(19) United States
(12) Patent Application Publication
(10) Pub. No.: US 2024/0401006 A1
(43) Pub. Date: Dec. 5, 2024

(54) MRNAS ENCODING CHIMERIC METABOLIC REPROGRAMMING POLYPEPTIDES AND USES THEREOF

(71) Applicant: Moderna TX, Inc., Cambridge, MA (US)

(72) Inventors: Laurie Kenney, Boston, MA (US); Eric Yi-Chun Huang, Boston, MA (US); Paul Stein, Watertown, MA (US); Michelle Dutra, Framingham, MA (US); Seymour de Picciotto, Boston, MA (US); Susamma Canali, Arlington, MA (US); Sze-Wah Tse, Boston, MA (US); Jared Iacovelli, San Diego, CA (US)

(21) Appl. No.: 18/294,884

(22) PCT Filed: Aug. 4, 2022
(86) PCT No.: PCT/US2022/074547

§ 371 Date: Feb. 2, 2024

Related U.S. Application Data
(60) Provisional application No. 63/229,411, filed on Aug. 4, 2021.

(51) Int. Cl. C12N 9/02; A61K 9/51; A61K 48/00; A61P 37/06; C12N 15/88

(52) U.S. Cl. CPC C12N 9/0069; A61K 9/5123; A61K 48/005; A61P 37/06; C12N 15/88; C07K 2319/033; C12Y 113/11011; C12Y 113/11052

(57) ABSTRACT

The disclosure features lipid nanoparticle (LNP) compositions comprising metabolic reprogramming molecules and membrane anchoring moieties and uses thereof. The LNP compositions of the present disclosure comprise mRNA therapeutics encoding metabolic reprogramming polypeptides, e.g., IDO or TDO and membrane anchoring moieties. The LNP compositions of the present disclosure can reprogram myeloid and/or dendritic cells, suppress T cells and/or induce immune tolerance in vivo.

### CROSS REFERENCE TO RELATED APPLICATIONS

[0001] This application is a U.S. National Phase Application under 35 U.S.C. § 371 of International Application No. PCT/US2022/074547 filed Aug. 4, 2022, which claims the benefit of U.S. Provisional Application No. 63/229,411, filed Aug. 4, 2021. The contents of the aforementioned applications are hereby incorporated by reference in their entirety.

### SEQUENCE LISTING

[0002] The instant application contains a Sequence Listing which has been submitted electronically in XML format and is hereby incorporated by reference in its entirety. Said XML copy, created on Nov. 28, 2022, is named M2180-7013WO_SL.xml, and is 6,528,553 bytes in size.

### BACKGROUND OF THE DISCLOSURE

[0003] T cells, e.g., autoreactive T cells, are widely considered to contribute to the development and/or progression of a wide variety of diseases, e.g., autoimmune diseases and/or inflammatory diseases. Much effort has been given to the development of therapies to suppress said T cells. However, such efforts have not resulted in meaningful therapies, in particular therapies that can be administered in vivo. Therefore, there is an unmet need to develop therapies that can suppress T cells, e.g., autoreactive T cells, for the treatment of autoimmune and/or inflammatory diseases.

### SUMMARY OF THE DISCLOSURE

[0004] The present disclosure provides, inter alia, lipid nanoparticle (LNP) compositions comprising metabolic reprogramming molecules (e.g., chimeric metabolic reprogramming molecules) and uses thereof. The LNP compositions of the present disclosure comprise mRNA therapeutics encoding (i) metabolic reprogramming polypeptides, e.g., an IDO molecule; a TDO molecule, or a combination thereof and (ii) membrane anchoring moieties. In an aspect, the LNP compositions of the present disclosure can reprogram myeloid and/or dendritic cells, suppress T cells (e.g., by limiting availability of necessary nutrients and/or increasing levels of inhibitory metabolites, e.g., decreasing the level of L-tryptophan and/or increasing the level of Kynurenine), activate T regulatory cells and/or induce immune tolerance in vivo. Also disclosed herein are methods of using an LNP composition comprising metabolic reprogramming molecules, for treating a disease associated with aberrant T cell function, e.g., an autoimmune disease or an inflammatory disease, or for inhibiting an immune response in a subject.

[0005] Additional aspects of the disclosure are described in further detail below.

[0006] In an aspect, provided herein is a lipid nanoparticle (LNP) composition comprising a polynucleotide comprising an mRNA which encodes (i) a metabolic reprogramming molecule chosen from: an Indoleamine-pyrrole 2,3-dioxygenase (IDO) molecule; a tryptophan 2,3-dioxygenase (TDO) molecule, or a combination thereof and (ii) a membrane anchoring moiety.

[0007] In another aspect, the disclosure provides a lipid nanoparticle (LNP) composition for immunomodulation, e.g., for including immune tolerance (e.g., suppressing T effector cells), the composition comprising a polynucleotide comprising an mRNA which encodes (i) a metabolic reprogramming molecule chosen from: an Indoleamine-pyrrole 2,3-dioxygenase (IDO) molecule; a tryptophan 2,3-dioxygenase (TDO) molecule, or a combination thereof and (ii) a membrane anchoring moiety.

[0008] In an aspect, provide herein is a lipid nanoparticle (LNP) composition, for stimulating T regulatory cells, the composition comprising a polynucleotide comprising an mRNA which encodes (i) a metabolic reprogramming molecule chosen from: an Indoleamine-pyrrole 2,3-dioxygenase (IDO) molecule; a tryptophan 2,3-dioxygenase (TDO) molecule, or a combination thereof and (ii) a membrane anchoring moiety.

[0009] In an embodiment of any of the LNP compositions disclosed herein, the LNP composition increases the level, e.g., expression and/or activity, of Kynurenine (Kyn) in, e.g., a sample comprising plasma, serum, or a population of cells. In an embodiment, the increase in the level of Kyn is compared to an otherwise similar sample which has not been contacted with the LNP composition comprising a metabolic reprogramming molecule.

[0010] In an embodiment of any of the LNP compositions disclosed herein, the LNP composition increases the level, e.g., expression and/or activity, of T regulatory cells (T regs), e.g., Foxp3+ T regulatory cells (e.g., splenic regulatory T cells). In an embodiment, the increase in the level of Treg cells is compared to an otherwise similar population of cells which has not been contacted with the LNP composition comprising a metabolic reprogramming molecule.

[0011] In an embodiment of any of the LNP compositions disclosed herein, the LNP composition results in:
[0012] (i) reduced engraftment of donor cells, e.g., donor immune cells, e.g., T cells, in a subject or host, e.g., a human, a non-human primate (NHP), rat or mouse;
[0013] (ii) reduction in the level, activity and/or secretion of interferon gamma (IFNg) from engrafted donor immune cells, e.g., T cells, in a subject or host, e.g., a human, a non-human primate (NHP), rat or mouse; and/or
[0014] (iii) an absence of, prevention of, or delay in the onset of, graft vs host disease (GvHD) in a subject or a host, e.g., a human, a non-human primate (NHP), rat or mouse.

[0015] In an embodiment of any of the LNP compositions disclosed herein, the LNP composition, results in amelioration or reduction of joint swelling, e.g., severity of joint swelling, e.g., as described herein, in a subject, e.g., as measured by an assay described herein.

[0016] In an embodiment of any of the LNP compositions disclosed herein, the polynucleotide comprising an mRNA encoding the metabolic reprograming molecule comprises at least one chemical modification.

[0017] In an embodiment of any of the LNP compositions disclosed herein, the LNP composition, comprises: (i) an ionizable lipid, e.g., an amino lipid; (ii) a sterol or other structural lipid; (iii) a non-cationic helper lipid or phospholipid; and (iv) a PEG-lipid.

[0018] In an aspect, provided herein is a pharmaceutical composition comprising an LNP composition disclosed herein.

[0019] In an aspect, provided herein is a method of modulating, e.g., suppressing, an immune response in a subject, comprising administering to the subject in need thereof an effective amount of an LNP composition comprising a polynucleotide comprising an mRNA which encodes (i) a metabolic reprogramming molecule and (ii) a membrane anchoring moiety.

[0020] In another aspect, the disclosure provides a method of stimulating T regulatory cells in a subject, comprising administering to the subject an effective amount of an LNP composition comprising a polynucleotide comprising an mRNA which encodes (i) a metabolic reprogramming molecule and (ii) a membrane anchoring moiety.

[0021] In yet another aspect, provided herein is a method of treating, or preventing a symptom of, a disease with aberrant T cell function, e.g., an autoimmune disease or an inflammatory disease, comprising administering to the subject in need thereof an effective amount of an LNP composition comprising a polynucleotide comprising an mRNA which encodes (i) a metabolic reprogramming molecule and (ii) a membrane anchoring moiety.

[0022] In an embodiment of any of the methods disclosed herein, the metabolic reprogramming molecule is chosen from: an Indoleamine-pyrrole 2,3-dioxygenase (IDO) molecule; a tryptophan 2,3-dioxygenase (TDO) molecule, or a combination thereof.

[0023] In an embodiment of any of the methods disclosed herein, the LNP composition comprising a polynucleotide comprising an mRNA which encodes (i) a metabolic reprogramming molecule and (ii) a membrane anchoring moiety, is administered in combination with an additional agent.

[0024] In an embodiment, the LNP composition and the additional agent are in the same composition or in separate compositions. In an embodiment, the LNP composition and the additional agent are administered substantially simultaneously or sequentially. In an embodiment, for sequential administration the LNP composition is administered before the additional agent is administered. In an embodiment, the order of administration is reversed.

[0025] In an embodiment of any of the methods disclosed herein, the disease is chosen from: rheumatoid arthritis (RA); graft versus host disease (GVHD) (e.g., acute GVHD or chronic GVHD); diabetes, e.g., Type 1 diabetes; inflammatory bowel disease (IBD); lupus (e.g., systemic lupus erythematosus (SLE)), multiple sclerosis: autoimmune hepatitis (e.g., Type 1 or Type 2); primary biliary cholangitis: organ transplant associated rejection; myasthenia gravis: Parkinson's Disease; Alzheimer's Disease; amyotrophic lateral sclerosis: psoriasis: polymyositis (also known as dermatomyositis); or atopic dermatitis.

[0026] In an embodiment, the autoimmune disease is rheumatoid arthritis (RA). In an embodiment, the autoimmune disease is graft versus host disease (GVHD) (e.g., acute GVHD or chronic GVHD). In an embodiment, the autoimmune disease is diabetes, e.g., Type 1 diabetes. In an embodiment, the autoimmune disease is inflammatory bowel disease (IBD). In an embodiment, IBD comprises colitis, ulcerative colitis or Crohn's disease. In an embodiment, the autoimmune disease is lupus, e.g., systemic lupus erythematosus (SLE). In an embodiment, the autoimmune disease is multiple sclerosis. In an embodiment, the autoimmune disease is autoimmune hepatitis, e.g., Type 1 or Type 2. In an embodiment, the autoimmune disease is primary biliary cholangitis.

[0027] In an embodiment, the autoimmune disease is organ transplant associated rejection. In an embodiment, an organ transplant associated rejection comprises renal allograft rejection; liver transplant rejection; bone marrow transplant rejection; or stem cell transplant rejection. In an embodiment, a stem cell transplant comprises a transplant of any one or all of the following types of cells: stem cells, cord blood stem cells, hematopoietic stem cells, embryonic stem cells, cells derived from or comprising mesenchymal stem cells, and/or induced stem cells (e.g., induced pluripotent stem cells). In an embodiment, the stem cell comprises a pluripotent stem cell.

[0028] In an embodiment, the autoimmune disease is myasthenia gravis. In an embodiment, the autoimmune disease is Parkinson's disease. In an embodiment, the autoimmune disease is Alzheimer's disease. In an embodiment, the autoimmune disease is amyotrophic lateral sclerosis.

[0029] In an embodiment, the autoimmune disease is psoriasis, e.g., subcutaneous psoriasis or intravenous psoriasis. In an embodiment, the autoimmune disease is polymyositis. In an embodiment, the autoimmune disease is atopic dermatitis. In an embodiment, the autoimmune disease is primary biliary cholangitis (PBC). In an embodiment, the autoimmune disease is primary sclerosing cholangitis (PSC).

[0030] In some embodiments of any of the methods disclosed herein, the LNP composition comprises: (i) an ionizable lipid, e.g., an amino lipid; (ii) a sterol or other structural lipid; (iii) a non-cationic helper lipid or phospholipid; and (iv) a PEG-lipid. In some embodiments, the ionizable lipid comprises Compound 18. In some embodiments, the ionizable lipid comprises Compound 25. In some embodiments of any of the methods disclosed herein, the LNP composition comprises an ionizable lipid comprising Compound 18 and a PEG-lipid comprising Compound 428.

[0031] In yet another aspect, disclosed herein is a kit comprising a container comprising an LNP composition disclosed herein, or a pharmaceutical LNP composition disclosed herein.

[0032] In some embodiments, the kit comprises a package insert comprising instructions for administration of the LNP composition or pharmaceutical LNP composition for treating or delaying a disease with aberrant T cell function in an individual.

[0033] In some embodiments, the LNP composition comprises a pharmaceutically acceptable carrier.

[0034] Additional features of any of the LNP compositions, pharmaceutical composition comprising said LNPs, methods or compositions for use disclosed herein include the following embodiments.

[0035] In an aspect, the disclosure provides an LNP composition comprising a polynucleotide, e.g., encoding an IDO molecule, e.g., IDO1 or IDO2, e.g., as described herein.

[0036] In an aspect, an LNP composition disclosed herein comprises a polynucleotide encoding an IDO molecule, e.g., IDO1. In an embodiment, the IDO molecule comprises an amino acid sequence having at least 85%, 90%, 95%, 96%, 97%, 98%, 99% or 100% identity to an IDO amino acid sequence described herein, e.g., an IDO amino acid sequence provided in Table 1A, e.g., any one of SEQ ID NOs: 1, 4, 6, 16, or 18, or a functional fragment thereof. In an embodiment, the IDO molecule comprises the amino acid sequence of an IDO amino acid sequence provided in Table 1A, e.g., any one of SEQ ID NOs: 1, 4, 6, 16, or 18, or a functional fragment thereof. In an embodiment, the IDO molecule comprises the amino acid sequence of any one of SEQ ID NOs: 1, 4, 6, 16, or 18, or a functional fragment thereof. In an embodiment, the IDO molecule comprises an amino acid sequence having at least 85%, 90%, 95%, 96%, 97%, 98%, 99% or 100% identity to amino acids 2-436 of SEQ ID NO: 1; amino acids 2-422 of SEQ ID NO: 4; or amino acids 2-403 of SEQ ID NO: 6; amino acids 2-434 of SEQ ID NO: 16; or amino acids 2-422 of SEQ ID NO: 18, or a functional fragment thereof. In an embodiment, the IDO molecule comprises amino acids 2-436 of SEQ ID NO: 1; amino acids 2-422 of SEQ ID NO: 4; or amino acids 2-403 of SEQ ID NO: 6; amino acids 2-434 of SEQ ID NO: 16; or amino acids 2-422 of SEQ ID NO: 18, or a functional fragment thereof. In an embodiment, the IDO molecule is a chimeric molecule, e.g., comprising an IDO portion and a non-IDO portion, e.g., a membrane anchoring moiety.

[0037] In an embodiment, the IDO molecule comprises an amino acid sequence for a leader sequence and/or an affinity tag. In an embodiment, the IDO molecule does not comprise an amino acid sequence for a leader sequence and/or an affinity tag.

[0038] In an embodiment, the polynucleotide encoding the IDO molecule and optionally, a membrane anchoring moiety comprises a nucleotide sequence having at least 50%, 55%, 60%, 65%, 70%, 75%, 80%, 85%, 90%, 95%, 96%, 97%, 98%, 99% or 100% identity to the sequence of any one of SEQ ID NOs: 2, 3, 24, 5, 7, 17, 19, or 300-318, or a functional fragment thereof. In an embodiment, the polynucleotide (e.g., mRNA) encoding the IDO molecule and optionally, a membrane anchoring moiety comprises the nucleotide sequence of any one of SEQ ID NOs: 2, 3, 24, 5, 7, 17, 19, or 300-318, or a functional fragment thereof. In an embodiment, the polynucleotide encoding the IDO molecule and optionally, a membrane anchoring moiety comprises a nucleotide sequence having at least 50%, 55%, 60%, 65%, 70%, 75%, 80%, 85%, 90%, 95%, 96%, 97%, 98%, 99% or 100% identity to nucleotides 4-1308 of SEQ ID NO: 2; nucleotides 4-1308 of SEQ ID NO: 3; nucleotides 4-1308 of SEQ ID NO: 24; nucleotides 4-1266 of SEQ ID NO: 5; nucleotides 4-1209 of SEQ ID NO: 7; nucleotides 4-1302 of SEQ ID NO: 17; or nucleotides 4-1266 of SEQ ID NO: 19, or a functional fragment thereof. In an embodiment, the polynucleotide (e.g., mRNA) encoding the IDO molecule comprises nucleotides 4-1308 of SEQ ID NO: 2; nucleotides 4-1308 of SEQ ID NO: 3; nucleotides 4-1308 of SEQ ID NO: 24; nucleotides 4-1266 of SEQ ID NO: 5; or nucleotides 4-1209 of SEQ ID NO: 7; nucleotides 4-1302 of SEQ ID NO: 17; or nucleotides 4-1266 of SEQ ID NO: 19, or a functional fragment thereof. In an embodiment, the polynucleotide encoding the IDO molecule comprises a codon-optimized nucleotide sequence. In an embodiment, the IDO molecule encoded by the polynucleotide is a chimeric molecule, e.g., the polynucleotide further comprises a nucleotide sequence encoding a non-IDO portion of the molecule, e.g., a membrane anchoring moiety.

[0039] In an embodiment, the polynucleotide (e.g., mRNA) encoding the IDO molecule comprises a nucleotide sequence that encodes for a leader sequence and/or an affinity tag. In an embodiment, the polynucleotide (e.g., mRNA) encoding the IDO molecule does not comprise a nucleotide sequence that encodes for a leader sequence and/or an affinity tag.

[0040] In an aspect, an LNP composition disclosed herein comprises a polynucleotide encoding an IDO molecule, e.g., IDO2. In an embodiment, the IDO molecule comprises an amino acid sequence having at least 85%, 90%, 95%, 96%, 97%, 98%, 99% or 100% identity to an IDO amino acid sequence described herein, e.g., an IDO amino acid sequence provided in Table 1A, e.g., SEQ ID NO: 8, or a functional fragment thereof. In an embodiment, the IDO molecule comprises the amino acid sequence of an IDO amino acid sequence provided in Table 1A, e.g., SEQ ID NO: 8, or a functional fragment thereof. In an embodiment, the IDO molecule comprises the amino acid sequence of SEQ ID NO: 8, or a functional fragment thereof. In an embodiment, the IDO molecule comprises an amino acid sequence having at least 85%, 90%, 95%, 96%, 97%, 98%, 99% or 100% identity to amino acids 2-420 of SEQ ID NO: 8, or a functional fragment thereof. In an embodiment, the IDO molecule comprises amino acids 2-420 of SEQ ID NO: 8, or a functional fragment thereof. In an embodiment, the IDO molecule is a chimeric molecule, e.g., comprising an IDO portion and a non-IDO portion, e.g., a membrane anchoring moiety.

[0041] In an embodiment, the IDO molecule comprises an amino acid sequence for a leader sequence and/or an affinity tag. In an embodiment, the IDO molecule does not comprise an amino acid sequence for a leader sequence and/or an affinity tag.

[0042] In an embodiment, the polynucleotide encoding the IDO molecule comprises a nucleotide sequence having at least 50%, 55%, 60%, 65%, 70%, 75%, 80%, 85%, 90%, 95%, 96%, 97%, 98%, 99% or 100% identity to the sequence of SEQ ID NO: 9 or 332, or a functional fragment thereof. In an embodiment, the polynucleotide (e.g., mRNA) encoding the IDO molecule comprises the nucleotide sequence of SEQ ID NO: 9 or 332, or a functional fragment thereof. In an embodiment, the polynucleotide encoding the IDO molecule comprises a nucleotide sequence having at least 50%, 55%, 60%, 65%, 70%, 75%, 80%, 85%, 90%, 95%, 96%, 97%, 98%, 99% or 100% identity to nucleotides 4-1260 of SEQ ID NO: 9, or a functional fragment thereof. In an embodiment, the polynucleotide (e.g., mRNA) encoding the IDO molecule comprises nucleotides 4-1260 of SEQ ID NO: 9, or a functional fragment thereof. In an embodiment, the polynucleotide encoding the IDO molecule comprises a codon-optimized nucleotide sequence. In an embodiment, the IDO molecule encoded by the polynucleotide is a chimeric molecule, e.g., the polynucleotide further comprises a nucleotide sequence encoding a non-IDO portion of the molecule, e.g., a membrane anchoring moiety.

[0043] In an embodiment, the polynucleotide (e.g., mRNA) encoding the IDO molecule comprises a nucleotide sequence that encodes for a leader sequence and/or an affinity tag. In an embodiment, the polynucleotide (e.g., mRNA) encoding the IDO molecule does not comprise a nucleotide sequence that encodes for a leader sequence and/or an affinity tag.

[0044] In an aspect, an LNP composition disclosed herein comprises a polynucleotide encoding a TDO molecule. In an embodiment, the TDO molecule comprises an amino acid sequence having at least 85%, 90%, 95%, 96%, 97%, 98%, 99% or 100% identity to a TDO amino acid sequence described herein, e.g., a TDO amino acid sequence provided in Table 1A, e.g., any one of SEQ ID NOs: 10, 12, 20, or 22, or a functional fragment thereof. In an embodiment, the TDO molecule comprises the amino acid sequence of a TDO amino acid sequence provided in Table 1A, e.g., any one of SEQ ID NOs: 10, 12, 20, or 22, or a functional fragment thereof. In an embodiment, the TDO molecule comprises the amino acid sequence of any one of SEQ ID NOs: 10, 12, 20, or 22, or a functional fragment thereof. In an embodiment, the TDO molecule comprises an amino acid sequence having at least 85%, 90%, 95%, 96%, 97%, 98%, 99% or 100% identity to amino acids 2-406 of SEQ ID NO: 10, amino acids 2-440 of SEQ ID NO: 12; amino acids 2-438 of SEQ ID NO: 20; or amino acids 2-426 of SEQ ID NO: 22, or a functional fragment thereof. In an embodiment, the TDO molecule comprises amino acids 2-406 of SEQ ID NO:10; amino acids 2-440 of SEQ ID NO: 12; amino acids 2-438 of SEQ ID NO: 20; or amino acids 2-426 of SEQ ID NO: 22, or a functional fragment thereof. In an embodiment, the TDO molecule is a chimeric molecule, e.g., comprising a TDO portion and a non-TDO portion, e.g., a membrane anchoring moiety.

[0045] In an embodiment, the TDO molecule comprises an amino acid sequence for a leader sequence and/or an affinity tag. In an embodiment, the TDO molecule does not comprise an amino acid sequence for a leader sequence and/or an affinity tag.

[0046] In an embodiment, the polynucleotide encoding the TDO molecule comprises a nucleotide sequence having at least 50%, 55%, 60%, 65%, 70%, 75%, 80%, 85%, 90%, 95%, 96%, 97%, 98%, 99% or 100% identity to the sequence of any one of SEQ ID NOs: 11, 13-15, 21, 23, or 319-331, or a functional fragment thereof. In an embodiment, the polynucleotide (e.g., mRNA) encoding the TDO molecule comprises the nucleotide sequence of any one of SEQ ID NOs: 11, 13-15, 21, 23, or 319-331, or a functional fragment thereof. In an embodiment, the polynucleotide encoding the TDO molecule comprises a nucleotide sequence having at least 50%, 55%, 60%, 65%, 70%, 75%, 80%, 85%, 90%, 95%, 96%, 97%, 98%, 99% or 100% identity to nucleotides 4-1218 of SEQ ID NO: 11; nucleotides 4-1320 of SEQ ID NO: 13; nucleotides 4-1320 of SEQ ID NO: 14; nucleotides 4-1320 of SEQ ID NO: 15; nucleotides 4-1314 of SEQ ID NO: 21; or nucleotides 4-1278 of SEQ ID NO: 23, or a functional fragment thereof. In an embodiment, the polynucleotide (e.g., mRNA) encoding the TDO molecule comprises nucleotides 4-1218 of SEQ ID NO: 11; nucleotides 4-1320 of SEQ ID NO: 13; nucleotides 4-1320 of SEQ ID NO: 14; nucleotides 4-1320 of SEQ ID NO: 15; nucleotides 4-1314 of SEQ ID NO: 21; or nucleotides 4-1278 of SEQ ID NO: 23, or a functional fragment thereof. In an embodiment, the polynucleotide encoding the TDO molecule comprises a codon-optimized nucleotide sequence. In an embodiment, the TDO molecule encoded by the polynucleotide is a chimeric molecule, e.g., the polynucleotide further comprises a nucleotide sequence encoding a non-TDO portion of the molecule, e.g., a membrane anchoring moiety.

[0047] In an embodiment, the polynucleotide (e.g., mRNA) encoding the TDO molecule comprises a nucleotide sequence that encodes for a leader sequence and/or an affinity tag. In an embodiment, the polynucleotide (e.g., mRNA) encoding the TDO molecule does not comprise a nucleotide sequence that encodes for a leader sequence and/or an affinity tag.

[0048] In an embodiment of any of the LNP compositions disclosed herein, the membrane anchoring moiety is a peptide or polypeptide derived from a prenylated protein, a fatty acylated protein, or a glycosylphosphatidylinositol (GPI)-anchored protein.

[0049] In an embodiment, the prenylated protein is a RAS anchoring moiety. In an embodiment, the RAS anchoring moiety is a KRAS anchoring moiety comprising the sequence of SEQ ID NO: 501, or an amino acid sequence differing by no more than 1, 2, or 3 amino acids therefrom, or a functional fragment thereof.

[0050] In an embodiment, the fatty acylated protein is a SRC-family tyrosine kinase anchoring moiety. In an embodiment, the SRC-family tyrosine kinase anchoring moiety is a SRC anchoring moiety. In an embodiment, the SRC anchoring moiety has a SRC myristylation sequence. In an embodiment, the membrane anchoring moiety is a SRC anchoring moiety comprising the sequence of SEQ ID NO: 500, or an amino acid sequence differing by no more than 1, 2, or 3 amino acids therefrom, or a functional fragment thereof.

[0051] In an embodiment, the membrane anchoring moiety is a GPI-anchored anchoring moiety.

[0052] In an embodiment of any of the LNP compositions, methods or compositions for use disclosed herein, the polynucleotide comprises at least one chemical modification. In an embodiment, the chemical modification is selected from the group consisting of pseudouridine, N1-methylpseudouridine, 2-thiouridine, 4′-thiouridine, 5-methylcytosine, 2-thio-1-methyl-1-deaza-pseudouridine, 2-thio-1-methyl-pseudouridine, 2-thio-5-aza-uridine, 2-thio-dihydropseudouridine, 2-thio-dihydrouridine, 2-thio-pseudouridine, 4-methoxy-2-thio-pseudouridine, 4-methoxy-pseudouridine, 4-thio-1-methyl-pseudouridine, 4-thio-pseudouridine, 5-aza-uridine, dihydropseudouridine, 5-methyluridine, 5-methyluridine, 5-methoxyuridine, and 2′-O-methyl uridine. In an embodiment, the chemical modification is selected from the group consisting of pseudouridine, N1-methylpseudouridine, 5-methylcytosine, 5-methoxyuridine, and a combination thereof. In an embodiment, the chemical modification is N1-methylpseudouridine. In an embodiment, each mRNA in the lipid nanoparticle comprises fully modified N1-methylpseudouridine.

[0053] In an embodiment of any of the LNP compositions, methods or compositions for use disclosed herein, the LNP composition comprises: (i) an ionizable lipid, e.g., an amino lipid; (ii) a sterol or other structural lipid; (iii) a non-cationic helper lipid or phospholipid; and (iv) a PEG-lipid.

[0054] In an embodiment of any of the LNP compositions, methods or compositions for use disclosed herein, the LNP composition comprises an ionizable lipid comprising an amino lipid. In an embodiment, the ionizable lipid comprises a compound of any of Formulae (I), (I-a), (I-b), (I-c), (II), (II-a), (II-b), (II-c), (II-d), (II-e), (II-f), (II-g), (II-h), or (III). In an embodiment, the ionizable lipid comprises a compound of Formula (I). In an embodiment, the ionizable lipid comprises Compound 18. In an embodiment, the ionizable lipid comprises Compound 25.

[0055] In some embodiments, the lipid nanoparticle comprises a compound of Formula (I):

[chemical structure]

or its N-oxide, or a salt or isomer thereof,
[0056] wherein R′^{a} is R′^{branched}; wherein
   [0057] R′^{branched} is

[chemical structure]

wherein [symbol] denotes a point of attachment;
[0058] wherein R^{aΔ}, R^{aβ}, R^{aγ}, and R^{aδ} are each independently selected from the group consisting of H, C₂₋₁₂ alkyl, and C₂₋₁₂ alkenyl;
[0059] R² and R³ are each independently selected from the group consisting of C₁₋₁₄ alkyl and C₂₋₁₄ alkenyl;
[0060] R⁴ is selected from the group consisting of —(CH₂)ₙOH, wherein n is selected from the group consisting of 1, 2, 3, 4, and 5, and

[chemical structure]

[0061] wherein [symbol] denotes a point of attachment; wherein
[0062] R¹⁰ is N(R)₂; each R is independently selected from the group consisting of C₁₋₆ alkyl, C₂₋₃ alkenyl, and H; and n2 is selected from the group consisting of 1, 2, 3, 4, 5, 6, 7, 8, 9, and 10;
[0063] each R⁵ is independently selected from the group consisting of C₁₋₃ alkyl, C₂₋₃ alkenyl, and H;
[0064] each R⁶ is independently selected from the group consisting of C₁₋₃ alkyl, C₂₋₃ alkenyl, and H;
[0065] M and M′ are each independently selected from the group consisting of —C(O)O— and —OC(O)—;
[0066] R′ is a C₁₋₁₂ alkyl or C₂₋₁₂ alkenyl;
[0067] 1 is selected from the group consisting of 1, 2, 3, 4, and 5; and
[0068] m is selected from the group consisting of 5, 6, 7, 8, 9, 10, 11, 12, and 13.

[0069] In some embodiments the compound of Formula (I) is selected from:

[chemical structure]

[0070] In some embodiments, the lipid nanoparticle further comprises a phospholipid, a structural lipid, and a PEG-lipid.

[0071] In some embodiments, the PEG-lipid is Compound I.

[0072] In some embodiments, the PEG-lipid is Compound VI.

[0073] In some embodiments, the PEG-lipid is PEG-DMG.

[0074] In some embodiments, the lipid nanoparticle comprises:
[0075] (i) 40-50 mol % of the compound of Formula (I), 30-45 mol % of the structural lipid, 5-15 mol % of the phospholipid, and 1-5 mol % of the PEG-lipid; or
[0076] (ii) 45-50 mol % of the compound of Formula (I), 35-45 mol % of the structural lipid, 8-12 mol % of the phospholipid, and 1.5 to 3.5 mol % of the PEG-lipid.

[0077] In some embodiments, the lipid nanoparticle comprises:
[0078] (i) Compound 18, (ii) Cholesterol, and (iii) PEG-DMG or Compound VI;
[0079] (i) Compound 25, (ii) Cholesterol, and (iii) PEG-DMG or Compound VI;
[0080] (i) Compound 301, (ii) Cholesterol, and (iii) PEG-DMG or Compound VI;
[0081] (i) Compound 357, (ii) Cholesterol, and (iii) PEG-DMG or Compound VI;
[0082] (i) Compound 18, (ii) DSPC or DOPE, (iii) Cholesterol, and (iv) PEG-DMG or Compound VI;
[0083] (i) Compound 25, (ii) DSPC or DOPE, (iii) Cholesterol, and (iv) PEG-DMG or Compound VI;
[0084] (i) Compound 301, (ii) DSPC or DOPE, (iii) Cholesterol, and (iv) PEG-DMG or Compound VI;
[0085] (i) Compound 357, (ii) DSPC or DOPE, (iii) Cholesterol, and (iv) PEG-DMG or Compound VI;

[0086] In an embodiment of any of the LNP compositions, methods or compositions for use disclosed herein, the LNP comprises about 20 mol % to about 60 mol % ionizable lipid, about 5 mol % to about 25 mol % non-cationic helper lipid or phospholipid, about 25 mol % to about 55 mol % sterol or other structural lipid, and about 0.5 mol % to about 15 mol % PEG lipid. In one embodiment of the LNPs or methods of the disclosure, the LNP comprises about 35 mol % to about 55 mol % ionizable lipid, about 5 mol % to about 25 mol % non-cationic helper lipid or phospholipid, about 30 mol % to about 40 mol % sterol or other structural lipid, and about 0 mol % to about 10 mol % PEG lipid. In one embodiment of the LNPs or methods of the disclosure, the LNP comprises about 50 mol % ionizable lipid, about 10 mol % non-cationic helper lipid or phospholipid, about 38.5 mol % sterol or other structural lipid, and about 1.5 mol % PEG lipid. In one embodiment of the LNPs or methods of the disclosure, the LNP comprises about 49.83 mol % ionizable lipid, about 9.83 mol % non-cationic helper lipid or phospholipid, about 30.33 mol % sterol or other structural lipid, and about 2.0 mol % PEG lipid. In an embodiment of any of the LNP compositions, methods or compositions for use disclosed herein, the LNP comprises about 45 mol % to about 50 mol % ionizable lipid. In one embodiment of the LNPs or methods of the disclosure, the LNP comprises about 45.5 mol % to about 49.5 mol % ionizable lipid. In one embodiment of the LNPs or methods of the disclosure, the LNP comprises about 46 mol % to about 49 mol % ionizable lipid. In one embodiment of the LNPs or methods of the disclosure, the LNP comprises about 46.5 mol % to about 48.5 mol % ionizable lipid. In one embodiment of the LNPs or methods of the disclosure, the LNP comprises about 47 mol % to about 48 mol % ionizable lipid.

[0087] In an embodiment of any of the LNP compositions, methods or compositions for use disclosed herein, the LNP comprises about 45 mol % to about 49.5 mol % ionizable lipid. In one embodiment of the LNPs or methods of the disclosure, the LNP comprises about 45 mol % to about 49 mol % ionizable lipid. In one embodiment of the LNPs or methods of the disclosure, the LNP comprises about 45 mol % to about 48.5 mol % ionizable lipid. In one embodiment of the LNPs or methods of the disclosure, the LNP comprises about 45 mol % to about 48 mol % ionizable lipid. In one embodiment of the LNPs or methods of the disclosure, the LNP comprises about 45 mol % to about 47.5 mol % ionizable lipid. In one embodiment of the LNPs or methods of the disclosure, the LNP comprises about 45 mol % to about 47 mol % ionizable lipid. In one embodiment of the LNPs or methods of the disclosure, the LNP comprises about 45 mol % to about 46.5 mol % ionizable lipid. In one embodiment of the LNPs or methods of the disclosure, the LNP comprises about 45 mol % to about 46 mol % ionizable lipid. In one embodiment of the LNPs or methods of the disclosure, the LNP comprises about 45 mol % to about 45.5 mol % ionizable lipid.

[0088] In an embodiment of any of the LNP compositions, methods or compositions for use disclosed herein, the LNP comprises about 45.5 mol % to about 50 mol % ionizable lipid. In one embodiment of the LNPs or methods of the disclosure, the LNP comprises about 46 mol % to about 50 mol % ionizable lipid. In one embodiment of the LNPs or methods of the disclosure, the LNP comprises about 46.5 mol % to about 50 mol % ionizable lipid. In one embodiment of the LNPs or methods of the disclosure, the LNP comprises about 47 mol % to about 50 mol % ionizable lipid. In one embodiment of the LNPs or methods of the disclosure, the LNP comprises about 47.5 mol % to about 50 mol % ionizable lipid. In one embodiment of the LNPs or methods of the disclosure, the LNP comprises about 48 mol % to about 50 mol % ionizable lipid. In one embodiment of the LNPs or methods of the disclosure, the LNP comprises about 48.5 mol % to about 50 mol % ionizable lipid. In one embodiment of the LNPs or methods of the disclosure, the LNP comprises about 49 mol % to about 50 mol % ionizable lipid. In one embodiment of the LNPs or methods of the disclosure, the LNP comprises about 49.5 mol % to about 50 mol % ionizable lipid.

[0089] In an embodiment of any of the LNP compositions, methods or compositions for use disclosed herein, the LNP comprises about 45 mol % to about 46 mol % ionizable lipid. In one embodiment of the LNPs or methods of the disclosure, the LNP comprises about 45.5 mol % to about 46.5 mol % ionizable lipid. In one embodiment of the LNPs or methods of the disclosure, the LNP comprises about 46 mol % to about 47 mol % ionizable lipid. In one embodiment of the LNPs or methods of the disclosure, the LNP comprises about 46.5 mol % to about 47.5 mol % ionizable lipid. In one embodiment of the LNPs or methods of the disclosure, the LNP comprises about 47 mol % to about 48 mol % ionizable lipid. In one embodiment of the LNPs or methods of the disclosure, the LNP comprises about 47.5 mol % to about 48.5 mol % ionizable lipid. In one embodiment of the LNPs or methods of the disclosure, the LNP comprises about 48 mol % to about 49 mol % ionizable lipid. In one embodiment of the LNPs or methods of the disclosure, the LNP comprises about 48.5 mol % to about 49.5 mol % ionizable lipid. In one embodiment of the LNPs or methods of the disclosure, the LNP comprises about 49 mol % to about 50 mol % ionizable lipid.

[0090] In an embodiment of any of the LNP compositions, methods or compositions for use disclosed herein, the LNP comprises about 45 mol % ionizable lipid. In one embodiment of the LNPs or methods of the disclosure, the LNP comprises about 45.5 mol % ionizable lipid. In one embodiment of the LNPs or methods of the disclosure, the LNP comprises about 46 mol % ionizable lipid. In one embodiment of the LNPs or methods of the disclosure, the LNP comprises about 46.5 mol % ionizable lipid. In one embodiment of the LNPs or methods of the disclosure, the LNP comprises about 47 mol % ionizable lipid. In one embodiment of the LNPs or methods of the disclosure, the LNP comprises about 47.5 mol % ionizable lipid. In one embodiment of the LNPs or methods of the disclosure, the LNP comprises about 48 mol % ionizable lipid. In one embodiment of the LNPs or methods of the disclosure, the LNP comprises about 48.5 mol % ionizable lipid. In one embodiment of the LNPs or methods of the disclosure, the LNP comprises about 49 mol % ionizable lipid. In one embodiment of the LNPs or methods of the disclosure, the LNP comprises about 49.5 mol % ionizable lipid. In one embodiment of the LNPs or methods of the disclosure, the LNP comprises about 50 mol % ionizable lipid.

[0091] In an embodiment of any of the LNP compositions, methods or compositions for use disclosed herein, the LNP comprises about 1 mol % to about 5 mol % PEG lipid. In one embodiment of the LNPs or methods of the disclosure, the LNP comprises about 1.5 mol % to about 4.5 mol % PEG lipid. In one embodiment of the LNPs or methods of the disclosure, the LNP comprises about 2 mol % to about 4 mol % PEG lipid. In one embodiment of the LNPs or methods of the disclosure, the LNP comprises about 2.5 mol % to about 3.5 mol % PEG lipid.

[0092] In an embodiment of any of the LNP compositions, methods or compositions for use disclosed herein, the LNP comprises about 1 mol % to about 4.5 mol % PEG lipid. In one embodiment of the LNPs or methods of the disclosure, the LNP comprises about 1 mol % to about 4 mol % PEG lipid. In one embodiment of the LNPs or methods of the disclosure, the LNP comprises about 1 mol % to about 3.5 mol % PEG lipid. In one embodiment of the LNPs or methods of the disclosure, the LNP comprises about 1 mol % to about 3 mol % PEG lipid. In one embodiment of the LNPs or methods of the disclosure, the LNP comprises about 1 mol % to about 2.5 mol % PEG lipid. In one embodiment of the LNPs or methods of the disclosure, the LNP comprises about 1 mol % to about 2 mol % PEG lipid. In one embodiment of the LNPs or methods of the disclosure, the LNP comprises about 1 mol % to about 1.5 mol % PEG lipid.

[0093] In an embodiment of any of the LNP compositions, methods or compositions for use disclosed herein, the LNP comprises about 1.5 mol % to about 5 mol % PEG lipid. In one embodiment of the LNPs or methods of the disclosure, the LNP comprises about 2 mol % to about 5 mol % PEG lipid. In one embodiment of the LNPs or methods of the disclosure, the LNP comprises about 2.5 mol % to about 5 mol % PEG lipid. In one embodiment of the LNPs or methods of the disclosure, the LNP comprises about 3 mol % to about 5 mol % PEG lipid. In one embodiment of the LNPs or methods of the disclosure, the LNP comprises about 3.5 mol % to about 5 mol % PEG lipid. In one embodiment of the LNPs or methods of the disclosure, the LNP comprises about 4 mol % to about 5 mol % PEG lipid. In one embodiment of the LNPs or methods of the disclosure, the LNP comprises about 4.5 mol % to about 5 mol % PEG lipid.

[0094] In one embodiment of the LNPs or methods of the disclosure, the LNP comprises about 1 mol % to about 2 mol % PEG lipid. In one embodiment of the LNPs or methods of the disclosure, the LNP comprises about 1.5 mol % to about 2.5 mol % PEG lipid. In one embodiment of the LNPs or methods of the disclosure, the LNP comprises about 2 mol % to about 3 mol % PEG lipid. In one embodiment of the LNPs or methods of the disclosure, the LNP comprises about 3.5 mol % to about 4.5 mol % PEG lipid. In one embodiment of the LNPs or methods of the disclosure, the LNP comprises about 4 mol % to about 5 mol % PEG lipid.

[0095] In an embodiment of any of the LNP compositions, methods or compositions for use disclosed herein, the LNP comprises about 1 mol % PEG lipid. In one embodiment of the LNPs or methods of the disclosure, the LNP comprises about 1.5 mol % PEG lipid. In one embodiment of the LNPs or methods of the disclosure, the LNP comprises about 2 mol % PEG lipid. In one embodiment of the LNPs or methods of the disclosure, the LNP comprises about 2.5 mol % PEG lipid. In one embodiment of the LNPs or methods of the disclosure, the LNP comprises about 3 mol % PEG lipid. In one embodiment of the LNPs or methods of the disclosure, the LNP comprises about 3.5 mol % PEG lipid. In one embodiment of the LNPs or methods of the disclosure, the LNP comprises about 4 mol % PEG lipid. In one embodiment of the LNPs or methods of the disclosure, the LNP comprises about 4.5 mol % PEG lipid. In one embodiment of the LNPs or methods of the disclosure, the LNP comprises about 5 mol % PEG lipid.

[0096] In one embodiment, the mol % sterol or other structural lipid is 18.5% phytosterol and the total mol % structural lipid is 38.5%. In one embodiment, the mol % sterol or other structural lipid is 28.5% phytosterol and the total mol % structural lipid is 38.5%.

[0097] In one embodiment of the LNPs or methods of the disclosure, the LNP comprises about 50 mol % Compound 18 and about 10 mol % non-cationic helper lipid or phospholipid. In one embodiment of the LNPs or methods of the disclosure, the LNP comprises 50 mol % Compound 18 and about 10 mol % non-cationic helper lipid or phospholipid. In one embodiment of the LNPs or methods of the disclosure, the LNP comprises about 50 mol % Compound 18 and 10 mol % non-cationic helper lipid or phospholipid. In one embodiment of the LNPs or methods of the disclosure, the LNP comprises 50 mol % Compound 18 and 10 mol % non-cationic helper lipid or phospholipid. In one embodiment of the LNPs or methods of the disclosure, the LNP comprises about 49.83 mol % Compound 18, about 9.83 mol % non-cationic helper lipid or phospholipid, about 30.33 mol % sterol or other structural lipid, and about 2.0 mol % PEG lipid.

[0098] In one embodiment of the LNPs or methods of the disclosure, the LNP comprises about 50 mol % Compound 25 and about 10 mol % non-cationic helper lipid or phospholipid. In one embodiment of the LNPs or methods of the disclosure, the LNP comprises 50 mol % Compound 25 and about 10 mol % non-cationic helper lipid or phospholipid. In one embodiment of the LNPs or methods of the disclosure, the LNP comprises about 50 mol % Compound 25 and 10 mol % non-cationic helper lipid or phospholipid. In one embodiment of the LNPs or methods of the disclosure, the LNP comprises 50 mol % Compound 25 and 10 mol % non-cationic helper lipid or phospholipid. In one embodiment of the LNPs or methods of the disclosure, the LNP comprises about 49.83 mol % Compound 25, about 9.83 mol % non-cationic helper lipid or phospholipid, about 30.33 mol % sterol or other structural lipid, and about 2.0 mol % PEG lipid.

[0099] In an embodiment of any of the LNP compositions, methods or compositions for use disclosed herein, the LNP is formulated for intravenous, subcutaneous, intramuscular, intraocular, intranasal, rectal or oral delivery. In an embodiment, the LNP is formulated for intravenous delivery. In an embodiment, the LNP is formulated for subcutaneous delivery. In an embodiment, the LNP is formulated for intramuscular delivery. In an embodiment, the LNP is formulated for intraocular delivery. In an embodiment, the LNP is formulated for intranasal delivery. In an embodiment, the LNP is formulated for rectal delivery. In an embodiment, the LNP is formulated for oral delivery.

[0100] In an embodiment of any of the methods or compositions for use disclosed herein, the disease associated with an aberrant T cell function is, e.g., an autoimmune disease, or a disease with hyper-activated immune function or an inflammatory disease. In an embodiment, the disease is an autoimmune disease. In an embodiment, the autoimmune disease is chosen from: rheumatoid arthritis (RA); graft versus host disease (GVHD) (e.g., acute GVHD or chronic GVHD); diabetes, e.g., Type 1 diabetes; inflammatory bowel disease (IBD); lupus (e.g., systemic lupus erythematosus (SLE)), multiple sclerosis: autoimmune hepatitis (e.g., Type 1 or Type 2); primary biliary cholangitis (PBC); primary sclerosing cholangitis (PSC); organ transplant associated rejection; myasthenia gravis: Parkinson's Disease; Alzheimer's Disease; amyotrophic lateral sclerosis: psoriasis: polymyositis (also known as dermatomyositis) or atopic dermatitis.

[0101] In an embodiment, the autoimmune disease is rheumatoid arthritis (RA). In an embodiment, the autoimmune disease is graft versus host disease (GVHD) (e.g., acute GVHD or chronic GVHD). In an embodiment, the autoimmune disease is diabetes, e.g., Type 1 diabetes. In an embodiment, the autoimmune disease is inflammatory bowel disease (IBD). In an embodiment, IBD comprises colitis, ulcerative colitis or Crohn's disease.

[0102] In an embodiment, the autoimmune disease is lupus, e.g., systemic lupus erythematosus (SLE). In an embodiment, the autoimmune disease is multiple sclerosis. In an embodiment, the autoimmune disease is autoimmune hepatitis, e.g., Type 1 or Type 2. In an embodiment, the autoimmune disease is primary biliary cholangitis.

[0103] In an embodiment, the autoimmune disease is organ transplant associated rejection. In an embodiment, an organ transplant associated rejection comprises renal allograft rejection; liver transplant rejection; bone marrow transplant rejection; or stem cell transplant rejection. In an embodiment, a stem cell transplant comprises a transplant of any one or all of the following types of cells: stem cells, cord blood stem cells, hematopoietic stem cells, embryonic stem cells, cells derived from or comprising mesenchymal stem cells, and/or induced stem cells (e.g., induced pluripotent stem cells). In an embodiment, the stem cell comprises a pluripotent stem cell.

[0104] In an embodiment, the autoimmune disease is myasthenia gravis. In an embodiment, the autoimmune disease is Parkinson's disease. In an embodiment, the autoimmune disease is Alzheimer's disease. In an embodiment, the autoimmune disease is amyotrophic lateral sclerosis.

[0105] In an embodiment, the autoimmune disease is psoriasis, e.g., subcutaneous or IV. In an embodiment, the autoimmune disease is polymyositis.

[0106] In an embodiment, the autoimmune disease is atopic dermatitis. In an embodiment, the autoimmune disease is primary biliary cholangitis (PBC). In an embodiment, the autoimmune disease is primary sclerosing cholangitis (PSC).

[0107] In an embodiment of any of the methods or compositions for use disclosed herein, the subject is a mammal, e.g., a human.

[0108] Additional features of any of the aforesaid LNP compositions or methods of using said LNP compositions include one or more of the following enumerated embodiments. Those skilled in the art will recognize or be able to ascertain using no more than routine experimentation, many equivalents to the specific embodiments of the invention described herein. Such equivalents are intended to be encompassed by the following enumerated embodiments.

### Other Embodiments of the Disclosure

[0109] E1. A lipid nanoparticle (LNP) composition comprising a polynucleotide comprising an mRNA which encodes (i) a metabolic reprogramming molecule chosen from: an Indoleamine-pyrrole 2,3-dioxygenase (IDO) molecule; a tryptophan 2,3-dioxygenase (TDO) molecule, or a combination thereof and (ii) a membrane anchoring moiety.

[0110] E2. A lipid nanoparticle (LNP) composition for immunomodulation, e.g., for including immune tolerance (e.g., suppressing T effector cells), the composition comprising a polynucleotide comprising an mRNA which encodes (i) a metabolic reprogramming molecule chosen from: an Indoleamine-pyrrole 2,3-dioxygenase (IDO) molecule; a tryptophan 2,3-dioxygenase (TDO) molecule, or a combination thereof and (ii) a membrane anchoring moiety.

[0111] E3. A lipid nanoparticle composition, for stimulating T regulatory cells, the composition comprising a polynucleotide comprising an mRNA which encodes (i) a metabolic reprogramming molecule chosen from: an Indoleamine-pyrrole 2,3-dioxygenase (IDO) molecule, or a combination thereof and (ii) a membrane anchoring moiety.

[0112] E4. The LNP composition of any one of embodiments E1-E3, wherein the metabolic reprogramming molecule is an IDO molecule.

[0113] E5. The LNP composition of embodiment E4, wherein the IDO molecule comprises a naturally occurring IDO molecule, a fragment (e.g., a functional fragment, e.g., a biologically active fragment) of a naturally occurring IDO molecule, or a variant thereof.

[0114] E6. The LNP composition of embodiment E4 or E5, wherein the IDO molecule has an enzymatic activity, e.g., as described herein.

[0115] E7. The LNP composition of any one of embodiments E4-E6, wherein the IDO molecule comprises IDO1 or IDO2.

[0116] E8. The LNP composition of any one of embodiments E4-E7, wherein the IDO molecule comprises IDO1.

[0117] E9. The LNP composition of any one of embodiments E4-E8, wherein the IDO molecule comprises an amino acid sequence having at least 85%, 90%, 95%, 96%, 97%, 98%, 99% or 100% identity to the sequence of any one of SEQ ID NOs: 1, 4, 6, 16, or 18; or amino acids 2-436 of SEQ ID NO: 1; amino acids 2-422 of SEQ ID NO: 4; or amino acids 2-403 of SEQ ID NO: 6; amino acids 2-434 of SEQ ID NO: 16; or amino acids 2-422 of SEQ ID NO: 18, or a functional fragment thereof, optionally wherein the IDO molecule is a chimeric molecule, e.g., comprising an IDO portion and a non-IDO portion.

[0118] E10. The LNP composition of any one of embodiments E4-E9, wherein the IDO molecule comprises the amino acid sequence of any one of SEQ ID NOs: 1, 4, 6, 16, or 18; or amino acids 2-436 of SEQ ID NO: 1; amino acids 2-422 of SEQ ID NO: 4; or amino acids 2-403 of SEQ ID NO: 6; amino acids 2-434 of SEQ ID NO: 16; or amino acids 2-422 of SEQ ID NO: 18, or a functional fragment thereof.

[0119] E11. The LNP composition of any one of embodiments E4-E10, wherein the IDO molecule comprises an amino acid sequence that does not comprise a leader sequence and/or an affinity tag.

[0120] E12. The LNP composition of any one of embodiments E4-E11, wherein the polynucleotide encoding the IDO molecule comprises a nucleotide sequence having at least 50%, 55%, 60%, 65%, 70%, 75%, 80%, 85%, 90%, 95%, 96%, 97%, 98%, 99% or 100% identity to the sequence of any one of SEQ ID NOs: 2, 3, 24, 5, 7, 17, 19, or 300-318, or a functional fragment thereof, or at least 50%, 55%, 60%, 65%, 70%, 75%, 80%, 85%, 90%, 95%, 96%, 97%, 98%, 99% or 100% identity to nucleotides 4-1308 of SEQ ID NO: 2; nucleotides 4-1308 of SEQ ID NO: 3; nucleotides 4-1308 of SEQ ID NO: 24; nucleotides 4-1266 of SEQ ID NO: 5; nucleotides 4-1209 of SEQ ID NO: 7; nucleotides 4-1302 of SEQ ID NO: 17; or nucleotides 4-1266 of SEQ ID NO: 19, or a functional fragment thereof, optionally wherein the nucleotide sequence is a codon-optimized nucleotide sequence, optionally wherein the IDO molecule encoded by the polynucleotide is a chimeric molecule, e.g., the polynucleotide further comprises a nucleotide sequence encoding a non-IDO portion of the molecule.

[0121] E13. The LNP composition of any one of embodiments E4-E10, or E12, wherein the polynucleotide encoding the IDO molecule comprises the nucleotide sequence of any one of SEQ ID NOs: 2, 3, 24, 5, 7, 17, 19, or 300-318; or nucleotides 4-1308 of SEQ ID NO: 2; nucleotides 4-1308 of SEQ ID NO: 3; nucleotides 4-1308 of SEQ ID NO: 24; nucleotides 4-1266 of SEQ ID NO: 5; nucleotides 4-1209 of SEQ ID NO: 7; nucleotides 4-1302 of SEQ ID NO: 17; or nucleotides 4-1266 of SEQ ID NO: 19, or a functional fragment thereof.

[0122] E14. The LNP composition of any one of embodiments E4-E9, E11, or E12, wherein the polynucleotide encoding the IDO molecule comprises a nucleotide sequence that does not encode a leader sequence and/or an affinity tag.

[0123] E15. The LNP composition of any one of embodiments E4-E7, wherein the IDO molecule comprises IDO2.

[0124] E16. The LNP composition of any one of embodiments E4-E7 or E15, wherein the IDO molecule comprises an amino acid sequence having at least 85%, 90%, 95%, 96%, 97%, 98%, 99% or 100% identity to the sequence of SEQ ID NO: 8 or amino acids 2-420 of SEQ ID NO: 8, or a functional fragment thereof, optionally wherein the IDO molecule is a chimeric molecule e.g., comprising an IDO portion and a non-IDO portion.

[0125] E17. The LNP composition of any one of embodiments E4-E7, E15, or E16, wherein the IDO molecule comprises the amino acid sequence of SEQ ID NO: 8 or amino acids 2-420 of SEQ ID NO: 8, or a functional fragment thereof.

[0126] E18. The LNP composition of any one of embodiments E4-E7, E15, or E16, wherein the IDO molecule comprises an amino acid sequence that does not comprise a leader sequence and/or an affinity tag.

[0127] E19. The LNP composition of any one of embodiments E4-E7, E15, or E16, wherein the polynucleotide encoding the IDO molecule comprises a nucleotide sequence having at least 50%, 55%, 60%, 65%, 70%, 75%, 80%, 85%, 90%, 95%, 96%, 97%, 98%, 99% or 100% identity to the sequence of SEQ ID NO: 9 or 332, or a functional fragment thereof, or at least 50%, 55%, 60%, 65%, 70%, 75%, 80%, 85%, 90%, 95%, 96%, 97%, 98%, 99% or 100% identity to nucleotides 4-1260 of SEQ ID NO: 9, or a functional fragment thereof, optionally wherein the nucleotide sequence is a codon-optimized nucleotide sequence, optionally wherein the IDO molecule encoded by the polynucleotide is a chimeric molecule, e.g., the polynucleotide further comprises a nucleotide sequence encoding a non-IDO portion of the molecule.

[0128] E20. The LNP composition of any one of embodiments E4-E7, E15-E17, or E19, wherein the polynucleotide encoding the IDO molecule comprises the nucleotide sequence of SEQ ID NO: 9 or 332 or nucleotides 4-1260 of SEQ ID NO: 9, or a functional fragment thereof. 5 E21. The LNP composition of any one of embodiments E4-E7, E15, E16, E18, or E19, wherein the polynucleotide encoding the IDO molecule comprises a nucleotide sequence that does not encode a leader sequence and/or an affinity tag.

[0129] E22. The LNP composition of any one of embodiments E1-E3, wherein the metabolic reprogramming molecule is a TDO molecule.

[0130] E23. The LNP composition of embodiment E22, wherein the TDO molecule comprises a naturally occurring TDO molecule, a fragment (e.g., a functional fragment, e.g., a biologically active fragment) of a naturally occurring TDO molecule, or a variant thereof.

[0131] E24. The LNP composition of any one of embodiments E22 or E23, wherein the TDO molecule has an enzymatic activity, e.g., as described herein.

[0132] E25. The LNP composition of any one of embodiments E22-E24, wherein the TDO molecule comprises an amino acid sequence having at least 85%, 90%, 95%, 96%, 97%, 98%, 99% or 100% identity to the sequence of SEQ ID NO: 10, 12, 20, or 22; or amino acids 2-406 of SEQ ID NO: 10, amino acids 2-440 of SEQ ID NO: 12; amino acids 2-438 of SEQ ID NO: 20; or amino acids 2-426 of SEQ ID NO: 22, or a functional fragment thereof. In an embodiment, the TDO molecule comprises amino acids 2-406 of SEQ ID NO:10, amino acids 2-440 of SEQ ID NO: 12; amino acids 2-438 of SEQ ID NO: 20; or amino acids 2-426 of SEQ ID NO: 22, or a functional fragment thereof, optionally wherein the TDO molecule further is a chimeric molecule e.g., comprising a TDO portion and a non-TDO portion.

[0133] E26. The LNP composition of any one of embodiments E22-E25, wherein the TDO molecule comprises the amino acid sequence of SEQ ID NO: 10, 12, 20, or 22; or amino acids 2-406 of SEQ ID NO: 10, amino acids 2-440 of SEQ ID NO: 12; amino acids 2-438 of SEQ ID NO: 20; or amino acids 2-426 of SEQ ID NO: 22, or a functional fragment thereof. In an embodiment, the TDO molecule comprises amino acids 2-406 of SEQ ID NO:10, amino acids 2-440 of SEQ ID NO: 12; amino acids 2-438 of SEQ ID NO: 20; or amino acids 2-426 of SEQ ID NO: 22, or a functional fragment thereof.

[0134] E27. The LNP composition of any one of embodiments E22-E25, wherein the TDO molecule comprises an amino acid sequence that does not comprise a leader sequence and/or an affinity tag.

[0135] E28. The LNP composition of any one of embodiments E32-E36, wherein the polynucleotide encoding the TDO molecule comprises a nucleotide sequence having at least 50%, 55%, 60%, 65%, 70%, 75%, 80%, 85%, 90%, 95%, 96%, 97%, 98%, 99% or 100% identity to the sequence of any one of SEQ ID NOs: 11, 13-15, 21, 23, or 319-331, or a functional fragment thereof, or at least 50%, 55%, 60%, 65%, 70%, 75%, 80%, 85%, 90%, 95%, 96%, 97%, 98%, 99% or 100% identity to nucleotides 4-1218 of SEQ ID NO: 11; nucleotides 4-1320 of SEQ ID NO: 13; nucleotides 4-1320 of SEQ ID NO: 14; nucleotides 4-1320 of SEQ ID NO: 15; nucleotides 4-1314 of SEQ ID NO: 21; or nucleotides 4-1278 of SEQ ID NO: 23, or a functional fragment thereof, optionally wherein the nucleotide sequence is a codon-optimized nucleotide sequence, optionally wherein the TDO molecule encoded by the polynucleotide is a chimeric molecule, e.g., the polynucleotide further comprises a nucleotide sequence encoding a non-TDO portion of the molecule.

[0136] E29. The LNP composition of any one of embodiments E22-E26 or E28, wherein the polynucleotide encoding the TDO molecule comprises the nucleotide sequence of any one of SEQ ID NOs: 11, 13-15, 21, 23, or 319-331; or nucleotides 4-1218 of SEQ ID NO: 11; nucleotides 4-1320 of SEQ ID NO: 13; nucleotides 4-1320 of SEQ ID NO: 14; nucleotides 4-1320 of SEQ ID NO: 15; nucleotides 4-1314 of SEQ ID NO: 21; or nucleotides 4-1278 of SEQ ID NO: 23, or a functional fragment thereof.

[0137] E30. The LNP composition of any one of embodiments E22-E25, E27, or E28, wherein the polynucleotide encoding the TDO molecule comprises a nucleotide sequence that does not encode a leader sequence and/or an affinity tag.

[0138] E31. The LNP composition of any one of embodiments E1-E30, wherein the metabolic reprogramming molecule comprises a half-life extender, e.g., a protein (or fragment thereof) that binds to a serum protein such as albumin, IgG, FcRn or transferrin.

[0139] E32. The LNP composition of embodiment E31, wherein the half-life extender is albumin, or a fragment thereof.

[0140] E33. The LNP composition of any one of the preceding embodiments, wherein the membrane anchoring moiety is a peptide or polypeptide derived from a prenylated protein, a fatty acylated protein, or a glycosylphosphatidylinositol (GPI)-anchored protein.

[0141] E34. The LNP composition of embodiment E33, wherein the prenylated protein is a RAS anchoring moiety.

[0142] E35. The LNP composition of embodiment E34, wherein the RAS anchoring moiety is a KRAS anchoring moiety comprising the sequence of SEQ ID NO: 501, or an amino acid sequence differing by no more than 1, 2, or 3 amino acids therefrom, or a functional fragment thereof.

[0143] E36. The LNP composition of embodiment E33, wherein the fatty acylated protein is a SRC-family tyrosine kinase anchoring moiety.

[0144] E37. The LNP composition of embodiment E36, wherein the SRC-family tyrosine kinase anchoring moiety is a SRC anchoring moiety.

[0145] E38. The LNP composition of embodiment E37, wherein the SRC anchoring moiety has a SRC myristylation sequence.

[0146] E39. The LNP composition of embodiment E37 or E38, wherein the membrane anchoring moiety is a SRC anchoring moiety comprising the sequence of SEQ ID NO: 500, or an amino acid sequence differing by no more than 1, 2, or 3 amino acids therefrom, or a functional fragment thereof.

[0147] E40. The LNP composition of embodiment E33, wherein the membrane anchoring moiety is a GPI-anchored anchoring moiety.

[0148] E41. The LNP composition of any one of the preceding embodiments, which increases the level, e.g., expression and/or activity, of Kynurenine (Kyn) in, e.g., a sample comprising plasma, serum or a population of cells.

[0149] E42. The LNP composition of embodiment E41, wherein the increase in the level of Kyn is compared to an otherwise similar sample which has not been contacted with the LNP composition comprising a metabolic reprogramming molecule.

[0150] E43. The LNP composition of embodiment E41 or E42, wherein the increase in the level of Kyn is about 1.2-15 fold.

[0151] E44. The LNP composition of any one of the preceding embodiments, which increases the level, e.g., expression and/or activity, of T regulatory cells (T regs), e.g., Foxp3+ T regulatory cells.

[0152] E45. The LNP composition of embodiment E44, wherein the increase in the level of Treg cells is compared to an otherwise similar population of cells which has not been contacted with the LNP composition comprising a metabolic reprogramming molecule.

[0153] E46. The LNP composition of embodiment E44 or E45, wherein the increase in the level of T reg cells is about 1.2-10 fold.

[0154] E47. The LNP composition of any one of the preceding embodiments, which results in:
[0155] (i) reduced engraftment of donor cells, e.g., donor immune cells, e.g., T cells, in a subject or host, e.g., a human, a non-human primate (NHP), rat or mouse;
[0156] (ii) reduction in the level, activity and/or secretion of IFNg from engrafted donor immune cells, e.g., T cells, in a subject or host, e.g., a human, a non-human primate (NHP), rat or mouse; and/or
[0157] (iii) an absence of, prevention of, or delay in the onset of, graft vs host disease (GvHD) in a subject or a host, e.g., a human, a non-human primate (NHP), rat or mouse.

[0158] E48. The LNP composition of embodiment E47, wherein the donor immune cells specified in (i) or (ii) comprise T cells, e.g., CD8+ T cells, CD4+ T cells, or T regulatory cells (e.g., CD25+ and/or FoxP3+ T cells).

[0159] E49. The LNP composition of embodiment E47 or E48, wherein the reduction in donor cell engraftment is about 1.5-10 fold, e.g., as measured by an assay described herein.

[0160] E50. The LNP composition of any of embodiments E47-E49, wherein the reduction in IFNg level, activity and/or secretion of IFNg is about 1.5-10 fold, e.g., as measured by an assay described herein.

[0161] E51. The LNP composition of any of embodiments E47-E50, wherein the delay in onset of GvHD is a delay of at least 1 week, 2 weeks, 3 weeks, 1 month, 2 months, 3 months, 4 months, 5 months, 6 months, 7 months, 8 months, 9 months, 10 months, 11 months, 12 months, 1.5 years or 2 years.

[0162] E52. The LNP composition of any of embodiments E47-E51, wherein any one of (i)-(iii) specified in embodiment E47 is compared to an otherwise similar host, e.g., a host that has not been contacted with the LNP composition comprising a metabolic reprogramming molecule.

[0163] E53. The LNP composition of any one of the preceding embodiments, which results in amelioration or reduction of joint swelling, e.g., severity of joint swelling, e.g., as described herein, in a subject, e.g., as measured by an assay described herein.

[0164] E54. The LNP composition of embodiment E53, wherein swelling is determined by an arthritis score, e.g., as described herein.

[0165] E55. The LNP composition of embodiment E53 or E54, wherein the reduction of joint swelling is compared to joint swelling in an otherwise similar subject, e.g., a subject who has not been contacted with the LNP composition comprising a metabolic reprogramming molecule.

[0166] E56. The LNP composition of any one of the preceding embodiments, wherein the polynucleotide comprising an mRNA encoding the metabolic reprogramming molecule, comprises at least one chemical modification.

[0167] E57. The LNP composition of embodiment E56, wherein the chemical modification is selected from the group consisting of pseudouridine, N1-methylpseudouridine, 2-thiouridine, 4′-thiouridine, 5-methylcytosine, 2-thio-1-methyl-1-deaza-pseudouridine, 2-thio-1-methyl-pseudouridine, 2-thio-5-aza-uridine, 2-thio-dihydropseudouridine, 2-thio-dihydrouridine, 2-thio-pseudouridine, 4-methoxy-2-thio-pseudouridine, 4-methoxy-pseudouridine, 4-thio-1-methyl-pseudouridine, 4-thio-pseudouridine, 5-aza-uridine, dihydropseudouridine, 5-methyluridine, 5-methyluridine, 5-methoxyuridine, and 2′-O-methyl uridine.

[0168] E58. The LNP composition of embodiment E57, wherein the chemical modification is selected from the group consisting of pseudouridine, N1-methylpseudouridine, 5-methylcytosine, 5-methoxyuridine, and a combination thereof.

[0169] E59. The LNP composition of embodiment E58, wherein the chemical modification is N1-methylpseudouridine.

[0170] E60. The LNP composition of any one of the preceding embodiments, wherein the mRNA in the 25 lipid nanoparticle comprises fully modified N1-methylpseudouridine.

[0171] E61. The LNP composition of any one of the preceding embodiments, wherein the LNP composition comprises: (i) an ionizable lipid, e.g., an amino lipid; (ii) a sterol or other structural lipid; (iii) a non-cationic helper lipid or phospholipid; and (iv) a PEG-lipid.

[0172] E62. The LNP composition of embodiment E61, wherein the ionizable lipid comprises an amino lipid.

[0173] E63. The LNP composition of embodiment E61 or E62, wherein the ionizable lipid comprises a compound of any of Formulae (I), (I-a), (I-b), (I-c), (II), (II-a), (II-b), (II-c), (II-d), (II-e), (II-f), (II-g), (II-h), or (III).

[0174] E64. The LNP composition of any one of embodiments E61-E63, wherein the ionizable lipid comprises a compound of Formula (I).

[0175] E65. The LNP composition of any one of embodiments E61-E64, wherein the ionizable lipid comprises Compound 18, Compound 25, Compound 301, or Compound 357.

[0176] E66. The LNP composition of any one of embodiments E61-E65, wherein the ionizable lipid comprises Compound 18 or Compound 25.

[0177] E67. The LNP composition of any one of embodiments E61-E66, wherein the LNP comprises a molar ratio of about 20-60% ionizable lipid: 5-25% phospholipid: 25-55% cholesterol; and 0.5-15% PEG lipid.

[0178] E68. The LNP composition of embodiment E67, wherein the LNP comprises a molar ratio of about 50% ionizable lipid: about 10% phospholipid: about 38.5% cholesterol; and about 1.5% PEG lipid.

[0179] E69. The LNP composition of embodiment E67 or E68, wherein the LNP comprises a molar ratio of about 49.83% ionizable lipid: about 9.83% phospholipid: about 30.33% cholesterol; and about 2.0% PEG lipid.

[0180] E70. The LNP composition of any one of embodiments E67-69, wherein the ionizable lipid comprises a compound of any of Formulae (I), (I-a), (I-b), (I-c), (II), (II-a), (II-b), (II-c), (II-d), (II-e), (II-f), (II-g), (II-h), or (III).

[0181] E71. The LNP composition of embodiment E70, wherein the ionizable lipid comprises a compound of Formula (I).

[0182] E72. The LNP composition of embodiment E70 or E71, wherein the ionizable lipid comprises Compound 18, Compound 25, Compound 301, or Compound 357.

[0183] E73. The LNP composition of any one of the preceding embodiments, which is formulated for intravenous, subcutaneous, intramuscular, intranasal, intraocular, rectal, or oral delivery.

[0184] E74. The LNP composition of any one of the preceding embodiments, further comprising a pharmaceutically acceptable carrier or excipient.

[0185] E75. A pharmaceutical composition comprising the LNP composition of any one of embodiments E1-E74.

[0186] E76. A method of modulating, e.g., suppressing, an immune response in a subject, comprising administering to the subject in need thereof an effective amount of an LNP composition comprising a polynucleotide comprising an mRNA which encodes (i) a metabolic reprogramming molecule and (ii) a membrane anchoring moiety.

[0187] E77. An LNP composition which comprises an mRNA encoding (i) a metabolic reprogramming molecule and (ii) a membrane anchoring moiety, for use in the modulation, e.g., suppression, of an immune response in a subject.

[0188] E78. A method of stimulating T regulatory cells in a subject, comprising administering to the subject an effective amount of an LNP composition comprising a polynucleotide comprising an mRNA which encodes (i) a metabolic reprogramming molecule and (ii) a membrane anchoring moiety.

[0189] E79. An LNP composition comprising a polynucleotide comprising an mRNA which encodes (i) a metabolic reprogramming molecule and (ii) a membrane anchoring moiety, for use in a method of stimulating T regulatory cells in a subject.

[0190] E80. A method of treating, or preventing a symptom of, a disease with aberrant T cell function, e.g., an autoimmune disease or an inflammatory disease, comprising administering to the subject in need thereof an effective amount of an LNP composition comprising a polynucleotide comprising an mRNA which encodes (i) a metabolic reprogramming molecule and (ii) a membrane anchoring moiety.

[0191] E81. An LNP composition comprising a polynucleotide comprising an mRNA which encodes (i) a metabolic reprogramming molecule and (ii) a membrane anchoring moiety, for use in a method of treating, or preventing a symptom of, a disease with aberrant T cell function, e.g., an autoimmune disease or an inflammatory disease.

[0192] E82. The method of E81, or the LNP composition for use of embodiment E92, wherein the disease is chosen from rheumatoid arthritis (RA); graft versus host disease (GVHD) (e.g., acute GVHD or chronic GVHD); diabetes, e.g., Type 1 diabetes; inflammatory bowel disease (IBD); lupus (e.g., systemic lupus erythematosus (SLE)), multiple sclerosis: autoimmune hepatitis (e.g., Type 1 or Type 2); primary biliary cholangitis (PBC); primary sclerosing cholangitis (PSC); organ transplant associated rejection; myasthenia gravis: Parkinson's Disease; Alzheimer's Disease; amyotrophic lateral sclerosis: psoriasis: polymyositis (also known as dermatomyositis) or atopic dermatitis.

[0193] E83. The method of embodiment E76 or E78, o the LNP composition for use of embodiment E77 or E79, wherein the subject has a disease chosen from rheumatoid arthritis (RA); graft versus host disease (GVHD) (e.g., acute GVHD or chronic GVHD); diabetes, e.g., Type 1 diabetes; inflammatory bowel disease (IBD); lupus (e.g., systemic lupus erythematosus (SLE)), multiple sclerosis: autoimmune hepatitis (e.g., Type 1 or Type 2); primary biliary cholangitis (PBC); primary sclerosing cholangitis (PSC); organ transplant associated rejection; myasthenia gravis: Parkinson's Disease; Alzheimer's Disease; amyotrophic lateral sclerosis: psoriasis: or polymyositis (also known as dermatomyositis) or atopic dermatitis.

[0194] E84. The method, or the LNP composition for use of any one of embodiments E76-E83, wherein the metabolic reprogramming molecule is chosen from: an Indoleamine-pyrrole 2,3-dioxygenase (IDO) molecule; a tryptophan 2,3-dioxygenase (TDO) molecule, or any combination thereof.

[0195] E85. The method, or the LNP composition for use of any one of embodiments E76-E84, wherein the subject is a mammal, e.g., a human.

[0196] E86. The method or LNP composition for use of any one of embodiments E76-E85, further comprising administration of an additional agent, e.g., a standard of care.

[0197] E87. The method or LNP composition for use of embodiment E86, wherein the additional agent is a polypeptide, e.g., a protein, a fusion protein, a soluble protein, or an antibody (e.g., an antibody fragment, a Fab, an scFv, a single domain Ab, a humanized antibody, a bispecific antibody and/or a multispecific antibody).

[0198] E88. The method or LNP composition for use of embodiment E86 or E87, wherein the LNP composition and the additional agent are in the same composition or in separate compositions.

[0199] E89. The method or LNP composition for use of any one of embodiments E86-E88, wherein the LNP composition and the additional agent are administered substantially simultaneously or sequentially.

[0200] E90. The LNP composition for use, or the method of any one of embodiments E76-E89, wherein the LNP composition is administered to a subject according to a dosing interval, e.g., as described herein.

[0201] E91. The LNP composition for use, or the method of embodiment E90, wherein the dosing interval comprises an initial dose of the LNP composition and one or more subsequent doses (e.g., 1-50 doses, 5-50 doses, 10-50 doses, 15-50 doses, 20-50 doses, 25-50 doses, 30-50 doses, 35-50 doses, 40-50 doses, 45-50 doses, 1-45 doses, 1-40 doses, 1-35 doses, 1-30 doses, 1-25 doses, 1-20 doses, 1-15 doses, 1-10 doses, 1-5 doses) of the same LNP composition.

[0202] E92. The LNP composition for use, or the method of embodiment E90 or E91, wherein the dosing interval comprises one or more doses of the LNP composition and one or more doses of an additional agent.

[0203] E93. The LNP composition for use, or the method of any one of embodiments E90-E92, wherein the dosing interval is performed over at least 1 week, 2 weeks, 3 weeks, or 4 weeks.

[0204] E94. The LNP composition for use, or the method of any one of embodiments E90-E93, wherein the dosing interval comprises a cycle, e.g., a seven-day cycle.

[0205] E95. The LNP composition for use, or the method of any one of embodiments E90-E94, wherein the dosing interval is repeated at least 1 time, at least 2 times, at least 3 times, at least 4 times, at least 5 times, at least 6 times, at least 7 times, at least 8 times, at least 9 times, or at least 10 times.

[0206] E96. The LNP composition for use, or the method of embodiment E95, wherein the repeated dosing interval is performed over at least 2 weeks, 3 weeks, 4 weeks, 2 months, 3 months, 4 months, 5 months, 6 months, 7 months, 8 months, 9 months, 10 months, 11 months, 12 months, 13 months, 14 months, 15 months, 16 months, 17 months, 18 months, 19 months, 20 months, 21 months, 22 months, 23 months, 24 months, 3 years, 4 years or 5 years.

[0207] E97. The LNP composition for use, or the method of any one of embodiments E90-E96, wherein the LNP composition is administered daily for at least 1 week, 2 weeks, 3 weeks, 4 weeks, 5 weeks, 6 weeks, 7 weeks, 8 weeks, 3 months, 4 months, 5 months, 6 months, 7 months, 8 months, 9 months, 10 months, 11 months or 1 year.

[0208] E98. The LNP composition for use, or the method of any one of embodiments E90-E97, wherein the LNP composition is administered for at least 2, 3, 4, 5, or 6 consecutive days in a seven day cycle, e.g., wherein the cycle is repeated about 1-20 times.

[0209] E99. The LNP composition for use, or the method of any one of embodiments E90-E98, wherein the LNP composition is administered by a route of administration chosen from: subcutaneous, intramuscular, intravenous, intranasal, oral, intraocular, or rectal.

[0210] E100. The LNP composition for use, or the method of any one of embodiments E90-E99, wherein the LNP composition is administered at a dose of about 0.1-10 mg per kg, about 0.1-9.5 mg per kg, about 0.1-9 mg per kg, about 0.1-8.5 mg per kg, about 0.1-8 mg per kg, about 0.1-7.5 mg per kg, about 0.1-7 mg per kg, about 0.1-6.5 mg per kg, about 0.1-6 mg per kg, about 0.1-5.5 mg per kg, about 0.1-5 mg per kg, about 0.1-4.5 mg per kg, about 0.1-4 mg per kg, about 0.1-3.5 mg per kg, about 0.1-3 mg per kg, about 0.1-2.5 mg per kg, about 0.1-2 mg per kg, about 0.1-1.5 mg per kg, about 0.1-1 mg per kg, about 0.1-0.9 mg per kg, about 0.1-0.8 mg per kg, about 0.1-0.7 mg per kg, about 0.1-0.6 mg per kg, or about 0.1-0.5 mg per kg.

[0211] E101. The LNP composition for use, or the method of any one of embodiments E90-E100, wherein the LNP composition is administered at a dose of about 0.2-10 mg per kg, about, 0.3-10 mg per kg, about 0.4-10 mg per kg, about 0.5-10 mg per kg, about 0.6-10 mg per kg, about 0.7-10 mg per kg, about 0.8-10 mg per kg, about 0.9-10 mg per kg, about 1-10 mg per kg, about 1.5-10 mg per kg, about 2-10 mg per kg, about 2.5-10 mg per kg, about 3-10 mg per kg, about 3.5-10 mg per kg, about 4-10 mg per kg, about 4.5-10 mg per kg, about 5-10 mg per kg, about 5.5-10 mg per kg, about 6-10 mg per kg, about 6.5-10 mg per kg, about 7-10 mg per kg, about 7.5-10 mg per kg, about 8-10 mg per kg, about 8.5-10 mg per kg, about 9-10 mg per kg, or about 9.5-10 mg per kg.

[0212] E102. The LNP composition for use, or the method of any one of embodiments E90-E101, wherein the LNP composition is administered at a dose of about 0.5 mg per kg.

[0213] E103. The LNP composition for use, or the method of any one of embodiments E76-E102, wherein the metabolic reprogramming molecule is an IDO molecule.

[0214] E104. The LNP composition for use, or the method of embodiment E103, wherein the IDO molecule comprises a naturally occurring IDO molecule, a fragment (e.g., a functional fragment, e.g., a biologically active fragment) of a naturally occurring IDO molecule, or a variant thereof.

[0215] E105. The LNP composition for use, or the method of embodiment E103 or E104, wherein the IDO molecule has an enzymatic activity, e.g., as described herein.

[0216] E106. The LNP composition for use, or the method of any one of embodiments E103-E105, wherein the IDO molecule comprises IDO1 or IDO2.

[0217] E107. The LNP composition for use, or the method of any one of embodiments E103-E106, wherein the IDO molecule comprises IDO1.

[0218] E108. The LNP composition for use, or the method of any one of embodiments E103-E107, wherein the IDO molecule comprises an amino acid sequence having at least 85%, 90%, 95%, 96%, 97%, 98%, 99% or 100% identity to the sequence of any one of SEQ ID NOs: 1, 4, 6, 16, or 18; or amino acids 2-436 of SEQ ID NO: 1; amino acids 2-422 of SEQ ID NO: 4; or amino acids 2-403 of SEQ ID NO: 6; amino acids 2-434 of SEQ ID NO: 16; or amino acids 2-422 of SEQ ID NO: 18, or a functional fragment thereof, optionally wherein the IDO molecule is a chimeric molecule, e.g., comprising an IDO portion and a non-IDO portion, e.g., a membrane anchoring moiety.

[0219] E109. The LNP composition for use, or the method of any one of embodiments E103-E108, wherein the IDO molecule and optionally, the membrane anchoring moiety comprises the amino acid sequence of any one of SEQ ID NOs: 1, 4, 6, 16, or 18; or amino acids 2-436 of SEQ ID NO: 1; amino acids 2-422 of SEQ ID NO: 4; or amino acids 2-403 of SEQ ID NO: 6; amino acids 2-434 of SEQ ID NO: 16; or amino acids 2-422 of SEQ ID NO: 18, or a functional fragment thereof.

[0220] E110. The LNP composition for use, or the method of any one of embodiments E103-E109, wherein the IDO molecule comprises an amino acid sequence that does not comprise a leader sequence and/or an affinity tag.

[0221] E111. The LNP composition for use, or the method of any one of embodiments E103-E110, wherein the polynucleotide encoding the IDO molecule comprises a nucleotide sequence having at least 50%, 55%, 60%, 65%, 70%, 75%, 80%, 85%, 90%, 95%, 96%, 97%, 98%, 99% or 100% identity to the sequence of any one of SEQ ID NOs: 2, 3, 24, 5, 7, 17, 19, or 300-318, or a functional fragment thereof, or at least 50%, 55%, 60%, 65%, 70%, 75%, 80%, 85%, 90%, 95%, 96%, 97%, 98%, 99% or 100% identity to, or a functional fragment thereof, optionally wherein the nucleotide sequence is a codon-optimized nucleotide sequence, optionally wherein the IDO molecule encoded by the polynucleotide is a chimeric molecule, e.g., the polynucleotide further comprises a nucleotide sequence encoding a non-IDO portion of the molecule, e.g., a membrane anchoring moiety.

[0222] E112. The LNP composition for use, or the method of any one of embodiments E103-E109 or E111, wherein the polynucleotide encoding the IDO molecule and optionally, the membrane anchoring moiety comprises the nucleotide sequence of any one of SEQ ID NOs: 2, 3, 24, 5, 7, 17, 19, or 300-318; or nucleotides 4-1308 of SEQ ID NO: 2; nucleotides 4-1308 of SEQ ID NO: 3; nucleotides 4-1308 of SEQ ID NO: 24; nucleotides 4-1266 of SEQ ID NO: 5; nucleotides 4-1209 of SEQ ID NO: 7; nucleotides 4-1302 of SEQ ID NO: 17; or nucleotides 4-1266 of SEQ ID NO: 19, or a functional fragment thereof.

[0223] E113. The LNP composition for use, or the method of any one of embodiments E103-E108, E110, or E111, wherein the polynucleotide encoding the IDO molecule comprises a nucleotide sequence that does not encode a leader sequence and/or an affinity tag.

[0224] E114. The LNP composition for use, or the method of any one of embodiments E103-E106, wherein the IDO molecule comprises IDO2.

[0225] E115. The LNP composition for use, or the method of any one of embodiments E103-E106 or E114, wherein the IDO molecule comprises an amino acid sequence having at least 85%, 90%, 95%, 96%, 97%, 98%, 99% or 100% identity to the sequence of SEQ ID NO: 8 or amino acids 2-420 of SEQ ID NO: 8, or a functional fragment thereof, optionally wherein the IDO molecule is a chimeric molecule, e.g., comprising an IDO portion and a non-IDO portion, e.g., a membrane anchoring moiety.

[0226] E116. The LNP composition for use, or the method of any one of embodiments E103-E106, E114, or E115, wherein the IDO molecule and optionally, the membrane anchoring moiety comprises the amino acid sequence of SEQ ID NO: 8 or amino acids 2-420 of SEQ ID NO: 8, or a functional fragment thereof.

[0227] E117. The LNP composition for use, or the method of any one of embodiments E103-E106, E114, or E115, wherein the IDO molecule comprises an amino acid sequence that does not comprise a leader sequence and/or an affinity tag.

[0228] E118. The LNP composition for use, or the method of any one of embodiments E103-E106 or E114-E117, wherein the polynucleotide encoding the IDO molecule comprises a nucleotide sequence having at least 50%, 55%, 60%, 65%, 70%, 75%, 80%, 85%, 90%, 95%, 96%, 97%, 98%, 99% or 100% identity to the sequence of SEQ ID NO: 9 or 332, or a functional fragment thereof, or at least 50%, 55%, 60%, 65%, 70%, 75%, 80%, 85%, 90%, 95%, 96%, 97%, 98%, 99% or 100% identity to nucleotides 4-1260 of SEQ ID NO: 9 or 332, or a functional fragment thereof, optionally wherein the nucleotide sequence is a codon-optimized nucleotide sequence, optionally wherein the IDO molecule encoded by the polynucleotide is a chimeric molecule, e.g., the polynucleotide further comprises a nucleotide sequence encoding a non-IDO portion of the molecule, e.g., a membrane anchoring moiety.

[0229] E119. The LNP composition for use, or the method of any one of embodiments E103-E106, E114-E116, or E118, wherein the polynucleotide encoding the IDO molecule and optionally, the membrane anchoring moiety comprises the nucleotide sequence of SEQ ID NO: 9 or 332 or nucleotides 4-1260 of SEQ ID NO: 9, or functional fragment thereof.

[0230] E120. The LNP composition for use, or the method of any one of embodiments E103-E106, E114, E115, E117, or E118, wherein the polynucleotide encoding the IDO molecule comprises a nucleotide sequence that does not encode a leader sequence and/or an affinity tag.

[0231] E121. The LNP composition for use, or the method of any one of embodiments E76-E102, wherein the metabolic reprogramming molecule is a TDO molecule.

[0232] E122. The LNP composition for use, or the method of embodiment E121, wherein the TDO molecule comprises a naturally occurring TDO molecule, a fragment (e.g., a functional fragment, e.g., a biologically active fragment) of a naturally occurring TDO molecule, or a variant thereof.

[0233] E123. The LNP composition for use, or the method of embodiment E121 or E122, wherein the TDO molecule has an enzymatic activity, e.g., as described herein.

[0234] E124. The LNP composition for use, or the method of any one of embodiments E121-E123, wherein the TDO molecule comprises an amino acid sequence having at least 85%, 90%, 95%, 96%, 97%, 98%, 99% or 100% identity to the sequence of SEQ ID NO: 10, 12, 20, or 22; or amino acids 2-406 of SEQ ID NO: 10 or amino acids 2-440 of SEQ ID NO: 12, or a functional fragment thereof, optionally wherein the TDO molecule is a chimeric molecule e.g., comprising a TDO portion and a non-TDO portion, e.g., a membrane anchoring moiety.

[0235] E125. The LNP composition for use, or the method of any one of embodiments E121-E124, wherein the TDO molecule and optionally, the membrane anchoring moiety comprises the amino acid sequence of SEQ ID NO: 10, 12, 20, or 22; or amino acids 2-406 of SEQ ID NO: 10, amino acids 2-440 of SEQ ID NO: 12; amino acids 2-438 of SEQ ID NO: 20; or amino acids 2-426 of SEQ ID NO: 22, or a functional fragment thereof.

[0236] E126. The LNP composition for use, or the method of any one of embodiments E121-E125, wherein the TDO molecule comprises an amino acid sequence that does not comprise a leader sequence and/or an affinity tag.

[0237] E127. The LNP composition for use, or the method of any one of embodiments E121-E126, wherein the polynucleotide encoding the TDO molecule comprises a nucleotide sequence having at least 50%, 55%, 60%, 65%, 70%, 75%, 80%, 85%, 90%, 95%, 96%, 97%, 98%, 99% or 100% identity to the sequence of any one of SEQ ID NOs: 11, 13-15, 21, 23, or 319-331, or a functional fragment thereof, or at least 50%, 55%, 60%, 65%, 70%, 75%, 80%, 85%, 90%, 95%, 96%, 97%, 98%, 99% or 100% identity to nucleotides 4-1218 of SEQ ID NO: 11; nucleotides 4-1320 of SEQ ID NO: 13; nucleotides 4-1320 of SEQ ID NO: 14; nucleotides 4-1320 of SEQ ID NO: 15; nucleotides 4-1314 of SEQ ID NO: 21; or nucleotides 4-1278 of SEQ ID NO: 23, or a functional fragment thereof, optionally wherein the nucleotide sequence is a codon-optimized nucleotide sequence, optionally wherein the TDO molecule encoded by the polynucleotide is a chimeric molecule, e.g., the polynucleotide further comprises a nucleotide sequence encoding a non-TDO portion of the molecule, e.g., membrane anchoring moiety.

[0238] E128. The LNP composition for use, or the method of any one of embodiments E121-E125 or E127, wherein the polynucleotide encoding the TDO molecule and optionally, the membrane anchoring moiety comprises the nucleotide sequence of any one of SEQ ID NOs: 11, 13-15, 21, 23, or 319-331.

[0239] E129. The LNP composition for use, or the method of any one of embodiments E121-E124, E126, or E127, wherein the polynucleotide encoding the TDO molecule comprises a nucleotide sequence that does not encode a leader sequence and/or an affinity tag.

[0240] E130. The LNP composition for use, or the method of any one of embodiments E76-E129, wherein the membrane anchoring moiety is a peptide or polypeptide derived from a prenylated protein, a fatty acylated protein, or a glycosylphosphatidylinositol (GPI)-anchored protein.

[0241] E131. The LNP composition of embodiment E130, wherein the prenylated protein is a RAS anchoring moiety.

[0242] E132. The LNP composition of embodiment E131, wherein the RAS anchoring moiety is a KRAS anchoring moiety comprising the sequence of SEQ ID NO: 501, or an amino acid sequence differing by no more than 1, 2, or 3 amino acids therefrom, or a functional fragment thereof.

[0243] E133. The LNP composition of embodiment E130, wherein the fatty acylated protein is a SRC-family tyrosine kinase anchoring moiety.

[0244] E134. The LNP composition of embodiment E133, wherein the SRC-family tyrosine kinase anchoring moiety is a SRC anchoring moiety.

[0245] E135. The LNP composition of embodiment E134, wherein the SRC anchoring moiety has a SRC myristylation sequence.

[0246] E136. The LNP composition of embodiment E134 or E135, wherein the membrane anchoring moiety is a SRC anchoring moiety comprising the sequence of SEQ ID NO: 500, or an amino acid sequence differing by no more than 1, 2, or 3 amino acids therefrom, or a functional fragment thereof.

[0247] E137. The LNP composition of embodiment E130, wherein the membrane anchoring moiety is a GPI-anchored anchoring moiety.

[0248] E138. The LNP composition for use, or the method of any one of embodiments E76-E137, which results in an increase in the level, e.g., expression and/or activity, of Kynurenine (Kyn) in, e.g., a sample from the subject, e.g., a sample comprising plasma, serum or a population of cells.

[0249] E139. The LNP composition for use, or the method of embodiment E138, wherein the increase in the level of Kyn is compared to an otherwise similar sample, e.g., a sample from a subject who has not been administered the LNP composition comprising a metabolic reprogramming molecule.

[0250] E140. The LNP composition for use, or the method of embodiment E138 or E139, wherein the increase in the level of Kyn is about 1.2-15 fold.

[0251] E141. The LNP composition for use, or the method of any one of embodiments E76-E137, which results in an increase in the level, e.g., expression and/or activity, of T regulatory cells (T regs), e.g., Foxp3+ T regulatory cells, e.g., in a sample from the subject.

[0252] E142. The LNP composition for use, or the method of embodiment E141, wherein the increase in the level of T reg cells is compared to an otherwise similar population of cells which has not been contacted with the LNP composition comprising a metabolic reprogramming molecule.

[0253] E143. The LNP composition for use, or the method of embodiment E141 or E142, wherein the increase in the level of T reg cells is about 1.2-10 fold.

[0254] E144. The LNP composition for use, or the method of any one of E76-E137, which results in:
[0255] (i) reduced engraftment of donor cells, e.g., donor immune cells, e.g., T cells, in a subject or host, e.g., a human, a non-human primate (NHP), rat or mouse;
[0256] (ii) reduction in the level, activity and/or secretion of IFNg from engrafted donor immune cells, e.g., T cells, in a subject or host, e.g., a human, a non-human primate (NHP), rat or mouse; and/or
[0257] (iii) an absence of, prevention of, or delay in the onset of, graft vs host disease (GvHD) in a subject or a host, e.g., a human, a non-human primate (NHP), rat or mouse.

[0258] E145. The LNP composition for use, or the method of embodiment E144, wherein the donor immune cells specified in (i) or (ii) comprise T cells, e.g., CD8+ T cells, CD4+ T cells, or T regulatory cells (e.g., CD25+ and/or FoxP3+ T cells).

[0259] E146. The LNP composition for use, or the method of embodiment E144 or E145, wherein the reduction in donor cell engraftment is about 1.5-10 fold, e.g., as measured by an assay described herein.

[0260] E147. The LNP composition for use, or the method of any one of embodiments E144-E146, wherein the reduction in IFNg level, activity, and/or secretion of IFNg is about 1.5-10 fold, e.g., as measured by an assay described herein.

[0261] E148. The LNP composition for use, or the method of any one of embodiments E144-E147, wherein the delay in onset of GvHD is a delay of at least 1 week, 2 weeks, 3 weeks, 1 month, 2 months, 3 months, 4 months, 5 months, 6 months, 7 months, 8 months, 9 months, 10 months, 11 months, 12 months, 1.5 years or 2 years.

[0262] E149. The LNP composition for use, or the method of any one of embodiments E144-E148, wherein any one of (i)-(iii) specified in embodiment E302 is compared to an otherwise similar host, e.g., a host that has not been contacted with the LNP composition comprising a metabolic reprogramming molecule.

[0263] E150. The LNP composition for use, or the method of any one of embodiments E144-E149, which results in amelioration or reduction of joint swelling, e.g., severity of joint swelling, in a subject, e.g., as measured by an assay described in herein.

[0264] E151. The LNP composition for use, or the method of embodiment E150, wherein swelling is determined by an arthritis score, e.g., as described herein.

[0265] E152. The LNP composition for use, or the method of embodiment E150 or E151, wherein the reduction of joint swelling is compared to joint swelling in an otherwise similar subject, e.g., a subject who has not been administered the LNP composition comprising a metabolic reprogramming molecule.

[0266] E153. The LNP composition for use, or the method of any one of embodiments E150-E152, wherein the subject has arthritis, e.g., as described herein.

[0267] E154. The LNP composition for use, or the method of embodiment E153, wherein administration of the LNP composition reduces disease severity, e.g., as compared to an otherwise similar subject who has not been administered the LNP composition comprising a metabolic reprogramming molecule.

[0268] E155. The LNP composition for use or the method of any one of embodiments, E76-E137, which results in amelioration or reduction of joint swelling, e.g., severity of joint swelling, in a subject, e.g., as measured by an assay described herein.

[0269] E156. The LNP composition for use or the method of embodiment E155, wherein swelling is determined by an arthritis score, e.g., as described herein.

[0270] E157. The LNP composition for use or the method of embodiment E155 or E156, wherein the reduction of joint swelling is compared to joint swelling in an otherwise similar subject, e.g., a subject who has not been administered the LNP composition comprising a metabolic reprogramming molecule.

[0271] E158. The LNP composition for use or the method of any one of embodiments E155-E157, wherein the subject has arthritis, e.g., as described herein.

[0272] E159. The LNP composition for use or the method of embodiment E158, wherein administration of the LNP composition reduces disease severity, e.g., as compared to an otherwise similar subject who has not been administered the LNP composition comprising a metabolic reprogramming molecule.

[0273] E160. The LNP composition for use or the method of any one of embodiments E76-E159, wherein the polynucleotide comprising an mRNA encoding the metabolic reprograming molecule inhibitor molecule, comprises at least one chemical modification.

[0274] E161. The LNP composition for use or the method of E160, wherein the chemical modification is selected from the group consisting of pseudouridine, N1-methylpseudouridine, 2-thiouridine, 4′-thiouridine, 5-methylcytosine, 2-thio-1-methyl-1-deaza-pseudouridine, 2-thio-1-methyl-pseudouridine, 2-thio-5-aza-uridine, 2-thio-dihydropseudouridine, 2-thio-dihydrouridine, 2-thio-pseudouridine, 4-methoxy-2-thio-pseudouridine, 4-methoxy-pseudouridine, 4-thio-1-methyl-pseudouridine, 4-thio-pseudouridine, 5-aza-uridine, dihydropseudouridine, 5-methyluridine, 5-methyluridine, 5-methoxyuridine, and 2′-O-methyl uridine.

[0275] E162. The LNP composition for use or the method of E161, wherein the chemical modification is selected from the group consisting of pseudouridine, N1-methylpseudouridine, 5-methylcytosine, 5-methoxyuridine, and a combination thereof.

[0276] E163. The LNP composition for use or the method of E162, wherein the chemical modification is N1-methylpseudouridine.

[0277] E164. The LNP composition for use, or the method of any one of embodiments E76-E163, wherein the mRNA in the lipid nanoparticle comprises fully modified N1-methylpseudouridine.

[0278] E165. The LNP composition for use or the method of any one of embodiments E76-E164, wherein the LNP composition comprises: (i) an ionizable lipid, e.g., an amino lipid; (ii) a sterol or other structural lipid; (iii) a non-cationic helper lipid or phospholipid; and (iv) a PEG-lipid.

[0279] E166. The LNP composition for use or the method of embodiment E165, wherein the ionizable lipid comprises an amino lipid.

[0280] E167. The LNP composition for use or the method of embodiment E165 or E166, wherein the ionizable lipid comprises a compound of any of Formulae (I), (I-a), (I-b), (I-c), (II), (II-a), (II-b), (II-c), (II-d), (II-e), (II-f), (II-g), (II-h), or (III).

[0281] E168. The LNP composition for use or the method of any one of embodiments E165-E167, wherein the ionizable lipid comprises a compound of Formula (I).

[0282] E169. The LNP composition for use or the method of any one of embodiments E165-E168, wherein the ionizable lipid comprises Compound 18, Compound 25, Compound 301, or Compound 357.

[0283] E170. The LNP composition for use or the method of any one of embodiments E165-E169, wherein the ionizable lipid comprises Compound 18 or Compound 25.

[0284] E171. The LNP composition for use or the method of any one of embodiments E165-E170, wherein the LNP comprises a molar ratio of about 20-60% ionizable lipid: 5-25% phospholipid: 25-55% cholesterol; and 0.5-15% PEG lipid.

[0285] E172. The LNP composition for use or the method of embodiment E171, wherein the LNP comprises a molar ratio of about 50% ionizable lipid: about 10% phospholipid: about 38.5% cholesterol; and about 1.5% PEG lipid.

[0286] E173. The LNP composition for use or the method of embodiment E171 or E172, wherein the LNP comprises a molar ratio of about 49.83% ionizable lipid: about 9.83% phospholipid: about 30.33% cholesterol; and about 2.0% PEG lipid.

[0287] E174. The LNP composition for use or the method of any one of embodiments E171-E173, wherein the ionizable lipid comprises a compound of any of Formulae (I), (I-a), (I-b), (I-c), (II), (II-a), (II-b), (II-c), (II-d), (II-e), (II-f), (II-g), (II-h), or (III).

[0288] E175. The LNP composition for use or the method of embodiment E174, wherein the ionizable lipid comprises a compound of Formula (I).

[0289] E176. The LNP composition for use or the method of embodiment E174 or E175, wherein the ionizable lipid comprises Compound 18, Compound 25, Compound 301, or Compound 357.

[0290] E177. The LNP composition for use or the method of embodiment E174-E176, wherein the ionizable lipid comprises Compound 18 or Compound 25.

[0291] E178. The LNP composition for use or the method of any one of embodiments E165-E177, wherein the PEG lipid is PEG-DMG.

[0292] E179. An mRNA construct comprising a polynucleotide which encodes (i) a metabolic reprogramming molecule or a fragment thereof (e.g., a functional fragment, e.g., a biologically active fragment) chosen from: an Indoleamine-pyrrole 2,3-dioxygenase (IDO) molecule; a tryptophan 2,3-dioxygenase (TDO) molecule, or a combination thereof and (ii) a membrane anchoring moiety, e.g., as described in the LNP composition of any one of embodiments E1-E74.

[0293] E180. A kit comprising a container comprising the lipid nanoparticle composition of any one of embodiments E1-E74, or the pharmaceutical composition of embodiment E75, and a package insert comprising instructions for administration of the lipid nanoparticle or pharmaceutical composition for treating or delaying a disease with aberrant T cell function in an individual.

[0294] E181. The kit of embodiment E180, wherein the lipid nanoparticle composition comprises a pharmaceutically acceptable carrier.

### BRIEF DESCRIPTIONS OF THE DRAWINGS

[0295] FIG. 1 is a graph showing the bioactivity of IDO in Hela cells following transfection with LNPs formulated with various IDO constructs.

[0296] FIG. 2 is a graph showing the bioactivity of TDO in Hela cells following transfection with LNPs formulated with various TDO constructs.

[0297] FIG. 3 is a western blot showing expression of IDO in RAWs cells from 6-72 hours following transfection with LNPs formulated with various IDO constructs.

[0298] FIG. 4 is a western blot showing expression of IDO in RAWs cells from 72-120 hours following transfection with LNPs formulated with various IDO constructs.

[0299] FIG. 5 is a series of western blots showing expression of IDO in RAWs cells from 6-72 hours following transfection with LNPs formulated with various IDO constructs.

[0300] FIG. 6 is a series of western blots showing expression of TDO in RAWs cells from 6-72 hours following transfection with LNPs formulated with various TDO constructs.

[0301] FIG. 7 is a western blot showing expression of IDO in JAWsii cells from 6-72 hours following transfection with LNPs formulated with various IDO constructs.

[0302] FIG. 8 is a graph showing expression of various IDO and TDO constructs in CD11c+IEIA+ cells at 24 hours after administration to naïve B6 mice, determined by flow cytometry.

[0303] FIG. 9 is a graph showing expression of various IDO and TDO constructs in CD11c+IEIA+ cells from spleen of naïve B6 mice at 24 hours after administration, determined by flow cytometry.

[0304] FIG. 10 is a graph showing serum KYN at 6 hours following administration of various IDO and TDO to naïve B6 mice.

[0305] FIG. 11 is a graph showing serum KYN, TRP, and KYN: TRP ratios at 24 hours following administration of various IDO and TDO LNPs to naïve B6 mice.

[0306] FIG. 12 is a graph showing serum KYN at 24 hours following administration of various IDO and TDO LNPs to naïve B6 mice.

[0307] FIG. 13 is a graph showing the mean clinical score of EAE disease in mice following administration of various IDO LNP formulations.

[0308] FIG. 14 is a graph showing host CD19+ B cells (left panel) and the ratio of host: donor CD8 T cells (right panel) in blood from mice on day 7 following administration of various IDO LNP formulations.

[0309] FIG. 15 is a graph showing the percentage (left panel) and number (right panel) of host CD19+ B cells in spleen from mice on day 14 following administration of various IDO LNP formulations.

[0310] FIG. 16 is a graph showing the number of donor Tregs (left panel) and number of host Tregs (right panel) in spleen from mice on day 14 following administration of various IDO LNP formulations.

[0311] FIG. 17 is a pair of graphs showing the number of donor Ki67+CD4+ cells (left panel) and Ki67+CD8+ cells (right panel) in spleen from mice on day 14 following administration of various IDO LNP formulations.

[0312] FIG. 18 is a series of graphs showing the percentage of IDO+ cells (left panels) and expression (MFI-right panels) in classical monocytes (top panels) and HLA-DR enriched DCs (bottom panels) in samples from cynomolgus monkeys at various time points following administration of various IDO LNP formulations.

[0313] FIG. 19 is a series of graphs showing the percentage of IDO+ cells (left panels) and expression (MFI-right panels) in classical monocytes (top panels) and HLA-DR enriched DCs (bottom panels) in samples from cynomolgus monkeys at various time points following administration of various IDO LNP formulations.

[0314] FIG. 20 is a series of graphs showing the percentage of IDO+ cells (left panels) and expression (MFI-right panels) in classical monocytes (top panels) and HLA-DR enriched DCs (bottom panels) in samples from cynomolgus monkeys at various time points following administration of various IDO LNP formulations.

[0315] FIG. 21 is a series of graphs showing the percentage of IDO+ cells (left panels) and expression (MFI-right panels) in CD4+ T cells (top panels) and CD8+ T cells (bottom panels) in samples from cynomolgus monkeys at various time points following administration of various IDO LNP formulations.

[0316] FIG. 22 is a series of graphs showing the percentage of IDO+ cells (left panels) and expression (MFI-right panels) in NK cells (top panels) and NK T cells (bottom panels) in samples from cynomolgus monkeys at various time points following administration of various IDO LNP formulations.

[0317] FIG. 23 is a series of graphs showing the percentage of IDO+CD20+ cells (left panel) and expression (MFI-right panel) in B cells in samples from cynomolgus monkeys at various time points following administration of various IDO LNP formulations.

[0318] FIG. 24 is a graph showing the KYN: TRP ratios over time in in samples from cynomolgus monkeys at following administration of various IDO LNP formulations.

[0319] FIG. 25 is a graph showing the level of serum KYN over time in samples from cynomolgus monkeys at following administration of various IDO LNP formulations.

[0320] FIG. 26 is a pair of graphs showing serum KYN in samples from cynomolgus monkeys at 6 hours (left panel) and 5 days (right panel) following administration of various IDO LNP formulations.

[0321] FIG. 27 is a graph showing the level of serum TRP over time in samples from cynomolgus monkeys at following administration of various IDO LNP formulations.

[0322] FIG. 28 is a pair of graphs showing serum TRP in samples from cynomolgus monkeys at 6 hours (left panel) and 5 days (right panel) following administration of various IDO LNP formulations.

[0323] FIG. 29 is a graph showing the KYN: TRP ratio over time in samples from cynomolgus monkeys following administration of various IDO LNP formulations.

[0324] FIG. 30 is a graph showing the disease score over time in samples from rats with collagen-induced arthritis (CIA) following IDO administration.

[0325] FIG. 31 is a pair of graphs showing IDO protein expression in the spleen (left panel) and in the liver (right panel) of mice following administration of various IDO LNP formulations.

[0326] FIG. 32 is a graph showing IDO protein expression in serum isolated from mice following administration of various IDO LNP formulations.

[0327] FIG. 33 is a graph showing the KYN:TRP ratio over time in serum or plasma samples from mice following administration of various IDO LNP formulations.

[0328] FIG. 34 is a pair of graphs showing the percentage of splenic Tregs (left panel) and the fold increase in Tregs (right panel) in mice following administration of various IDO LNP formulations.

### DETAILED DESCRIPTION

[0329] Using the compositions and methods described herein, myeloid and/or dendritic cells can be reprogrammed to be tolerogenic, e.g., to have immune-suppressive properties, e.g., T cell suppressive properties. For example, tolerogenic myeloid and/or dendritic cells can induce T cell anergy, T cell apoptosis and/or induce T regulatory cells. Tolerogenic antigen presenting cells, e.g., tolerogenic DCs, are effective in antigen uptake, processing, and presentation, but do not provide naïve T cells with the necessary costimulatory signals required for activation of T cell effector functions and/or T cell proliferation. Therefore, tolerogenic myeloid and/or dendritic cells can be used to induce immune tolerance. In one embodiment, the subject methods and compositions can be used to reprogram myeloid and/or dendritic cells in vivo such that they can reduce T cell function.

[0330] Exemplary methods of making tolerogenic myeloid and/or dendritic cells include expressing metabolic reprogramming molecules in said cells, e.g., as described herein. Without wishing to be bound by theory, it is believed that in some embodiments, expression of a metabolic reprogramming molecule in a myeloid and/or dendritic cell can result in, e.g., altered cytokine secretion, altered metabolism, change from “M1-like” to “M2-like” phenotype, and/or altered expression of costimulatory or coinhibitory surface molecules (e.g., CD80, CD86). In some embodiments, expression of a metabolic reprogramming molecule in a myeloid and/or dendritic cell can result in an alteration in T cells, e.g., alteration in proliferation, growth, viability, and/or function.

[0331] As another example, immune tolerance can be induced by reducing the levels of L-tryptophan, e.g., by inducing L-tryptophan catabolism and production of immunosuppressive Kynurenine. Without wishing to be bound by theory, it is believed that in some embodiments, administration of an LNP comprising an mRNA encoding a metabolic reprogramming molecule can mediate immune suppression by reducing the level of Tryptophan and/or increasing the level of immunosuppressive Kynurenine. In some embodiments, reducing the levels of Tryptophan and/or increasing the levels of Kynurenine can produce inhibitory signals in T cells and/or can result in suppression of T cells. In some embodiments, administration of an LNP comprising an mRNA encoding a metabolic reprogramming molecule can result in an increase in T regulatory cells. In some embodiments, an LNP comprising an mRNA encoding a metabolic reprogramming molecule reprograms myeloid and/or dendritic cells to induce immune tolerance e.g., in vivo. Exemplary effects on Kynurenine levels in vivo with LNP compositions disclosed herein is provided in Examples 3, 7, and 8. Exemplary protective in vivo effects of LNPs comprising metabolic reprogramming molecules are provided in Example 4 (in an EAE model, Example 5 (in a GvHD model), and Example 6 (in a rodent arthritis models).

[0332] Accordingly, disclosed herein is a lipid nanoparticle (LNP) composition comprising an mRNA encoding an anchored metabolic reprogramming molecule and uses thereof. The LNP compositions of the present disclosure comprise mRNA therapeutics encoding (i) metabolic reprogramming polypeptides, e.g., an IDO molecule; a TDO molecule; or a combination thereof and (ii) membrane anchoring moieties. In an aspect, the LNP compositions of the present disclosure can reprogram myeloid and/or dendritic cells, suppress T cells (e.g., by limiting availability of necessary nutrients and/or increasing levels of inhibitory metabolites, e.g., reducing the level of L-tryptophan and/or increasing the level of Kynurenine), activate T regulatory cells and/or induce immune tolerance in vivo. Also disclosed herein are methods of using an LNP composition comprising metabolic reprogramming molecules, for treating a disease associated with an aberrant T cell function, e.g., an autoimmune disease or an inflammatory disease, or for inhibiting an immune response in a subject.

### Definitions

[0333] Administering: As used herein, “administering” refers to a method of delivering a composition to a subject or patient. A method of administration may be selected to target delivery (e.g., to specifically deliver) to a specific region or system of a body. For example, an administration may be parenteral (e.g., subcutaneous, intracutaneous, intravenous, intraperitoneal, intramuscular, intraarticular, intraarterial, intrasynovial, intrasternal, intrathecal, intralesional, or intracranial injection, as well as any suitable infusion technique), oral, trans- or intra-dermal, interdermal, rectal, intravaginal, topical (e.g., by powders, ointments, creams, gels, lotions, and/or drops), mucosal, nasal, buccal, enteral, vitreal, intratumoral, sublingual, intranasal; by intratracheal instillation, bronchial instillation, and/or inhalation; as an oral spray and/or powder, nasal spray, and/or aerosol, and/or through a portal vein catheter. Preferred means of administration are intravenous or subcutaneous.

[0334] Approximately, about: As used herein, the terms “approximately” or “about,” as applied to one or more values of interest, refers to a value that is similar to a stated reference value. In certain embodiments, the term “approximately” or “about” refers to a range of values that fall within 25%, 20%, 19%, 18%, 17%, 16%, 15%1, 14%, 13%, %12%, 11%, 10%, 9%, 8%, 7%, 6%, 5%, 4%, 3%, 2%, 1%, or less in either direction (greater than or less than) of the stated reference value unless otherwise stated or otherwise evident from the context (except where such number would exceed 100% of a possible value). For example, when used in the context of an amount of a given compound in a lipid component of an LNP, “about” may mean+/−5% of the recited value. For instance, an LNP including a lipid component having about 40% of a given compound may include 30-50% of the compound. As another example, an LNP including a lipid component having about 50% of a given compound may include 45-55% of the compound.

[0335] Chimeric molecule: As used herein, the term “chimeric molecule” refers to a molecule having at least two portions from different sources or origins, e.g., a metabolic reprogramming molecule and an anchoring moiety. For example, the two portions can be derived from two different polypeptides. Each portion can be a full-length polypeptide or a fragment (e.g., a functional fragment) thereof. In certain embodiments, the two polypeptides are from two different organisms. In other embodiments, the two polypeptides are from the same organism. The two different polypeptides can be both naturally occurring or synthetic, or one naturally occurring the other synthetic. In some embodiments, the two portions of the chimeric molecule have different properties. The property may be a biological property, such as a function or activity in vitro, ex vivo, or in vivo. The property can also be a physical or chemical property, such as a binding affinity or specificity. In some embodiments, the two portions are covalently linked together. For example, the two portions can be linked directly, e.g., by a single covalent bond (e.g., a peptide bond), or indirectly, e.g., through a linker (e.g., a peptide linker). In some embodiments, a chimeric molecule is produced through the joining of two or more polynucleotides that originally coded for separate polypeptides. In some embodiments, the two or more polynucleotides form a single open reading frame.

[0336] Conjugated: As used herein, the term “conjugated,” when used with respect to two or more moieties, means that the moieties are physically associated or connected with one another, either directly or via one or more additional moieties that serves as a linking agent, to form a structure that is sufficiently stable so that the moieties remain physically associated under the conditions in which the structure is used, e.g., physiological conditions. In some embodiments, two or more moieties may be conjugated by direct covalent chemical bonding. In other embodiments, two or more moieties may be conjugated by ionic bonding or hydrogen bonding.

[0337] Contacting: As used herein, the term “contacting” means establishing a physical connection between two or more entities. For example, contacting a cell with an mRNA or a lipid nanoparticle composition means that the cell and mRNA or lipid nanoparticle are made to share a physical connection. Methods of contacting cells with external entities both in vivo, in vitro, and ex vivo are well known in the biological arts. In exemplary embodiments of the disclosure, the step of contacting a mammalian cell with a composition (e.g., a nanoparticle, or pharmaceutical composition of the disclosure) is performed in vivo. For example, contacting a lipid nanoparticle composition and a cell (for example, a mammalian cell) which may be disposed within an organism (e.g., a mammal) may be performed by any suitable administration route (e.g., parenteral administration to the organism, including intravenous, intramuscular, intradermal, and subcutaneous administration). For a cell present in vitro, a composition (e.g., a lipid nanoparticle) and a cell may be contacted, for example, by adding the composition to the culture medium of the cell and may involve or result in transfection. Moreover, more than one cell may be contacted by a nanoparticle composition.

[0338] Delivering: As used herein, the term “delivering” means providing an entity to a destination. For example, delivering a therapeutic and/or prophylactic to a subject may involve administering an LNP including the therapeutic and/or prophylactic to the subject (e.g., by an intravenous, intramuscular, intradermal, or subcutaneous route). Administration of an LNP to a mammal or mammalian cell may involve contacting one or more cells with the lipid nanoparticle.

[0339] Encapsulate: As used herein, the term “encapsulate” means to enclose, surround, or encase. In some embodiments, a compound, polynucleotide (e.g., an mRNA), or other composition may be fully encapsulated, partially encapsulated, or substantially encapsulated. For example, in some embodiments, an mRNA of the disclosure may be encapsulated in a lipid nanoparticle, e.g., a liposome.

[0340] Encapsulation efficiency: As used herein, “encapsulation efficiency” refers to the amount of a therapeutic and/or prophylactic that becomes part of an LNP, relative to the initial total amount of therapeutic and/or prophylactic used in the preparation of an LNP. For example, if 97 mg of therapeutic and/or prophylactic are encapsulated in an LNP out of a total 100 mg of therapeutic and/or prophylactic initially provided to the composition, the encapsulation efficiency may be given as 97%. As used herein, “encapsulation” may refer to complete, substantial, or partial enclosure, confinement, surrounding, or encasement.

[0341] Effective amount: As used herein, the term “effective amount” of an agent is that amount sufficient to effect beneficial or desired results, for example, clinical results, and, as such, an “effective amount” depends upon the context in which it is being applied. For example, in the context of the amount of a target cell delivery potentiating lipid in a lipid composition (e.g., LNP) of the disclosure, an effective amount of a target cell delivery potentiating lipid is an amount sufficient to effect a beneficial or desired result as compared to a lipid composition (e.g., LNP) lacking the target cell delivery potentiating lipid. Non-limiting examples of beneficial or desired results effected by the lipid composition (e.g., LNP) include increasing the percentage of cells transfected and/or increasing the level of expression of a protein encoded by a nucleic acid associated with/encapsulated by the lipid composition (e.g., LNP). In the context of administering a target cell delivery potentiating lipid-containing lipid nanoparticle such that an effective amount of lipid nanoparticles are taken up by target cells in a subject, an effective amount of target cell delivery potentiating lipid-containing LNP is an amount sufficient to effect a beneficial or desired result as compared to an LNP lacking the target cell delivery potentiating lipid. Non-limiting examples of beneficial or desired results in the subject include increasing the percentage of cells transfected, increasing the level of expression of a protein encoded by a nucleic acid associated with/encapsulated by the target cell delivery potentiating lipid-containing LNP and/or increasing a prophylactic or therapeutic effect in vivo of a nucleic acid, or its encoded protein, associated with/encapsulated by the target cell delivery potentiating lipid-containing LNP, as compared to an LNP lacking the target cell delivery potentiating lipid. In some embodiments, a therapeutically effective amount of target cell delivery potentiating lipid-containing LNP is sufficient, when administered to a subject suffering from or susceptible to an infection, disease, disorder, and/or condition, to treat, improve symptoms of, diagnose, prevent, and/or delay the onset of the infection, disease, disorder, and/or condition. In another embodiment, an effective amount of a lipid nanoparticle is sufficient to result in expression of a desired protein in at least about 5%, 10%, 15%, 20%, 25% or more of target cells. For example, an effective amount of target cell delivery potentiating lipid-containing LNP can be an amount that results in transfection of at least 5%, 10%, 15%, 20%, 25%, 30%, or 35% of target cells after a single intravenous injection.

[0342] Expression: As used herein, “expression” of a nucleic acid sequence refers to one or more of the following events: (1) production of an RNA template from a DNA sequence (e.g., by transcription); (2) processing of an RNA transcript (e.g., by splicing, editing, 5′ cap formation, and/or 3′ end processing); (3) translation of an RNA into a polypeptide or protein; and (4) post-translational modification of a polypeptide or protein.

[0343] Ex vivo: As used herein, the term “ex vivo” refers to events that occur outside of an organism (e.g., animal, plant, or microbe or cell or tissue thereof). Ex vivo events may take place in an environment minimally altered from a natural (e.g., in vivo) environment.

[0344] Fragment: A “fragment,” as used herein, refers to a portion. For example, fragments of proteins may include polypeptides obtained by digesting full-length protein isolated from cultured cells or obtained through recombinant DNA techniques. A fragment of a protein can be, for example, a portion of a protein that includes one or more functional domains such that the fragment of the protein retains the functional activity of the protein.

[0345] GC-rich: As used herein, the term “GC-rich” refers to the nucleobase composition of a polynucleotide (e.g., mRNA), or any portion thereof (e.g., an RNA element), comprising guanine (G) and/or cytosine (C) nucleobases, or derivatives or analogs thereof, wherein the GC-content is greater than about 50%. The term “GC-rich” refers to all, or to a portion, of a polynucleotide, including, but not limited to, a gene, a non-coding region, a 5′ UTR, a 3′ UTR, an open reading frame, an RNA element, a sequence motif, or any discrete sequence, fragment, or segment thereof which comprises about 50% GC-content. In some embodiments of the disclosure, GC-rich polynucleotides, or any portions thereof, are exclusively comprised of guanine (G) and/or cytosine (C) nucleobases.

[0346] GC-content: As used herein, the term “GC-content” refers to the percentage of nucleobases in a polynucleotide (e.g., mRNA), or a portion thereof (e.g., an RNA element), that are either guanine (G) and cytosine (C) nucleobases, or derivatives or analogs thereof, (from a total number of possible nucleobases, including adenine (A) and thymine (T) or uracil (U), and derivatives or analogs thereof, in DNA and in RNA). The term “GC-content” refers to all, or to a portion, of a polynucleotide, including, but not limited to, a gene, a non-coding region, a 5′ or 3′ UTR, an open reading frame, an RNA element, a sequence motif, or any discrete sequence, fragment, or segment thereof.

[0347] Metabolic reprogramming molecule. As used herein, the term “metabolic reprogramming molecule” refers to a molecule that has a metabolic function in a cell. Exemplary metabolic reprogramming molecules are an IDO molecule (e.g., IDO1 and/or IDO2); a TDO molecule; an AMPK molecule; an Aryl hydrocarbon receptor (AhR) molecule (e.g., a constitutively active AhR (CA-Ahr)); an ALDH1A2 molecule; a HMOX1 molecule; an Arginase molecule; a CD73 molecule; or a CD39 molecule. In some embodiments, metabolic reprogramming molecule includes a full length naturally occurring metabolic reprogramming molecule, a fragment (e.g., a functional fragment), or a variant having at least 80%, 85%, 90%, 95%, 96%, 97%, 98%, or 99% sequence identity to: a naturally occurring wild type metabolic reprogramming molecule or a fragment (e.g., a functional fragment) thereof. In some embodiments, the metabolic reprogramming molecule is a metabolic reprogramming gene product, e.g., a metabolic reprogramming polypeptide.

[0348] IDO molecule: As used herein, the term “IDO molecule” refers to a full length naturally occurring IDO (e.g., a mammalian IDO, e.g., human IDO, e.g., associated with UniProt: P14902 and/or NCBI Gene ID: 3620; or associated with UniProt Q6ZQW0 and/or NCBI Gene ID 169355) a fragment (e.g., a functional fragment) of IDO, or a variant of IDO having at least 80%, 85%, 90%, 95%, 96%, 97%, 98%, or 99% sequence identity to: a naturally occurring wild type IDO or a fragment (e.g., a functional fragment) thereof. In some embodiments, the IDO molecule is an IDO gene product, e.g., an IDO polypeptide. In some embodiments, the variant, e.g., active variant, is a derivative, e.g., a mutant, of a wild type polypeptide. In some embodiments, the IDO variant, e.g., active variant of IDO, has at least 50%, 60%, 70%, 80%, 85%, 90%, 95%, 96%, 97%, 98%, 99% or 100% activity of wild type IDO polypeptide. In some embodiments, the IDO molecule comprises a portion of IDO (e.g., an extracellular portion of IDO) and a heterologous sequence, e.g., a sequence other than that of naturally occurring IDO.

[0349] TDO molecule: As used herein, the term “TDO molecule” refers to a full length naturally occurring TDO (e.g., a mammalian TDO, e.g., human TDO, e.g., associated with UniProt: P48775 and/or NCBI Gene ID: 6999) a fragment (e.g., a functional fragment) of TDO, or a variant of TDO having at least 80%, 85%, 90%, 95%, 96%, 97%, 98%, or 99% sequence identity to: a naturally occurring wild type TDO or a fragment (e.g., a functional fragment) thereof. In some embodiments, the TDO molecule is a TDO gene product, e.g., a TDO polypeptide. In some embodiments, the variant, e.g., active variant, is a derivative, e.g., a mutant, of a wild type polypeptide. In some embodiments, the TDO variant, e.g., active variant of TDO, has at least 50%, 60%, 70%, 80%, 85%, 90%, 95%, 96%, 97%, 98%, 99% or 100% activity of wild type TDO polypeptide. In some embodiments, the TDO molecule comprises a portion of TDO (e.g., an extracellular portion of TDO) and a heterologous sequence, e.g., a sequence other than that of naturally occurring TDO.

[0350] AMPK molecule: As used herein, the term “AMPK molecule” refers to an AMPK molecule comprising one, two, or all of the alpha, beta and gamma subunits of AMPK. In an embodiment, an AMPK molecule is an alpha-beta-gamma heterotrimer. In an embodiment, an AMPK molecule comprises an alpha subunit. In an embodiment, an AMPK molecule comprises a beta subunit. In an embodiment, an AMPK molecule comprise a gamma subunit. In an embodiment, an AMPK molecule comprises a gamma subunit, e.g., a full length naturally occurring AMPK gamma subunit (e.g., a mammalian AMPK gamma subunit, e.g., human AMPK gamma subunit, e.g., associated with UniProt: Q9UGJO; UniProt P54619; or UniProt Q9UGI9) a fragment (e.g., a functional fragment) of AMPK gamma subunit, or a variant of AMPK gamma subunit having at least 80%, 85%, 90%, 95%, 96%, 97%, 98%, or 99% sequence identity to: a naturally occurring wild type AMPK gamma subunit or a fragment (e.g., a functional fragment) thereof. In some embodiments, the AMPK molecule is an AMPK gene product, e.g., an AMPK polypeptide. In some embodiments, the variant, e.g., active variant, is a derivative, e.g., a mutant, of a wild type polypeptide. In some embodiments, the AMPK gamma subunit variant, e.g., active variant of AMPK gamma subunit, has at least 50%, 60%, 70%, 80%, 85%, 90%, 95%, 96%, 97%, 98%, 99% or 100% activity of wild type AMPK gamma subunit polypeptide. In some embodiments, the AMPK molecule comprises a portion of AMPK gamma subunit (e.g., an extracellular portion of AMPK gamma subunit) and a heterologous sequence, e.g., a sequence other than that of naturally occurring AMPK gamma subunit.

[0351] AhR molecule: As used herein, the term “AhR molecule” refers to a full length naturally occurring AhR (e.g., a mammalian AhR, e.g., human AhR, e.g., associated with UniProt: P35869 and/or NCBI Gene ID: 196) a fragment (e.g., a functional fragment) of AhR, or a variant of AhR having at least 80%, 85%, 90%, 95%, 96%, 97%, 98%, or 99% sequence identity to: a naturally occurring wild type AhR or a AhR (e.g., a functional fragment) thereof. In some embodiments, the AhR molecule is a constitutively active AhR (CA-AhR). In some embodiments, CA-AhR comprises a fragment (e.g., a functional fragment, e.g., a biologically active fragment) of a naturally occurring AhR molecule. In some embodiments, CA-AhR comprises a deletion in a naturally occurring AhR molecule, e.g., a deletion of a periodicity-ARNT-single-minded (PAS) B motif, e.g., as disclosed in Ito et al (2004) Journal of Biological Chemistry 279:24 25204-210.

[0352] In some embodiments, the AhR molecule is an AhR gene product, e.g., an AhR polypeptide. In some embodiments, the AhR fragment or CA-AhR, has at least 50%, 60%, 70%, 80%, 85%, 90%, 95%, 96%, 97%, 98%, 99% or 100% activity of wild type AhR polypeptide bound to its ligand, e.g., cognate ligand. In some embodiments, the AhR molecule comprises a portion of AhR and a heterologous sequence, e.g., a sequence other than that of naturally occurring AhR.

[0353] ALDH1A2 molecule: As used herein, the term “ALDH1A2 molecule” refers to a full length naturally occurring ALDH1A2 (e.g., a mammalian ALDH1A2, e.g., human ALDH1A2, e.g., associated with NCBI Gene ID: 8854) a fragment (e.g., a functional fragment) of ALDH1A2, or a variant of ALDH1A2 having at least 80%, 85%, 90%, 95%, 96%, 97%, 98%, or 99% sequence identity to: a naturally occurring wild type ALDH1A2 or an ALDH1A2 (e.g., a functional fragment) thereof. In some embodiments, the ALDH1A2 molecule is an ALDH1A2 gene product, e.g., an ALDH1A2 polypeptide. In some embodiments, the variant, e.g., active variant, is a derivative, e.g., a mutant, of a wild type polypeptide. In some embodiments, the ALDH1A2 variant, e.g., active variant of ALDH1A2, has at least 50%, 60%, 70%, 80%, 85%, 90%, 95%, 96%, 97%, 98%, 99% or 100% activity of wild type ALDH1A2 polypeptide. In some embodiments, the ALDH1A2 molecule comprises a portion of ALDH1A2 (e.g., an extracellular portion of ALDH1A2) and a heterologous sequence, e.g., a sequence other than that of naturally occurring ALDH1A2.

[0354] HMOX1 molecule: As used herein, the term “HMOX1 molecule” refers to a full length naturally occurring HMOX1 (e.g., a mammalian HMOX1, e.g., human HMOX1, e.g., associated with NCBI Gene ID: 3162) a fragment (e.g., a functional fragment) of HMOX1, or a variant of HMOX1 having at least 80%, 85%, 90%, 95%, 96%, 97%, 98%, or 99% sequence identity to: a naturally occurring wild type HMOX1 or a HMOX1 (e.g., a functional fragment) thereof. In some embodiments, the HMOX1 molecule is a HMOX1 gene product, e.g., a HMOX1 polypeptide. In some embodiments, the variant, e.g., active variant, is a derivative, e.g., a mutant, of a wild type polypeptide. In some embodiments, the HMOX1 variant, e.g., active variant of HMOX1, has at least 50%, 60%, 70%, 80%, 85%, 90%, 95%, 96%, 97%, 98%, 99% or 100% activity of wild type HMOX1 polypeptide. In some embodiments, the HMOX1 molecule comprises a portion of HMOX1 (e.g., an extracellular portion of HMOX1) and a heterologous sequence, e.g., a sequence other than that of naturally occurring HMOX1.

[0355] ARGINASE molecule: As used herein, the term “ARGINASE molecule” refers to a full length naturally occurring ARGINASE (e.g., a mammalian ARGINASE, e.g., human ARGINASE, e.g., associated with NCBI Gene ID: 383 or 384) a fragment (e.g., a functional fragment) of ARGINASE, or a variant of ARGINASE having at least 80%, 85%, 90%, 95%, 96%, 97%, 98%, or 99% sequence identity to: a naturally occurring wild type ARGINASE or a ARGINASE (e.g., a functional fragment) thereof. In some embodiments, the ARGINASE molecule is a ARGINASE gene product, e.g., a ARGINASE polypeptide. In some embodiments, the variant, e.g., active variant, is a derivative, e.g., a mutant, of a wild type polypeptide. In some embodiments, the ARGINASE variant, e.g., active variant of ARGINASE, has at least 50%, 60%, 70%, 80%, 85%, 90%, 95%, 96%, 97%, 98%, 99% or 100% activity of wild type ARGINASE polypeptide. In some embodiments, the ARGINASE molecule comprises a portion of ARGINASE (e.g., an extracellular portion of ARGINASE) and a heterologous sequence, e.g., a sequence other than that of naturally occurring ARGINASE.

[0356] CD73 molecule: As used herein, the term “CD73 molecule” refers to a full length naturally occurring CD73 (e.g., a mammalian CD73, e.g., human CD73, e.g., associated with UniProt ID: P21589; NCBI Gene ID: 4907) a fragment (e.g., a functional fragment) of CD73, or a variant of CD73 having at least 80%, 85%, 90%, 95%, 96%, 97%, 98%, or 99% sequence identity to: a naturally occurring wild type CD73 or a CD73 (e.g., a functional fragment) thereof. In some embodiments, the CD73 molecule is a CD73 gene product, e.g., a CD73 polypeptide. In some embodiments, the variant, e.g., active variant, is a derivative, e.g., a mutant, of a wild type polypeptide. In some embodiments, the CD73 variant, e.g., active variant of CD73, has at least 50%, 60%, 70%, 80%, 85%, 90%, 95%, 96%, 97%, 98%, 99% or 100% activity of wild type CD73 polypeptide. In some embodiments, the CD73 molecule comprises a portion of CD73 (e.g., an extracellular portion of CD73) and a heterologous sequence, e.g., a sequence other than that of naturally occurring CD73.

[0357] CD39 molecule: As used herein, the term “CD39 molecule” refers to a full length naturally occurring CD39 (e.g., a mammalian CD39, e.g., human CD39, e.g., associated with UniProt ID: P49961; NCBI Gene ID: 953) a fragment (e.g., a functional fragment) of CD39, or a variant of CD39 having at least 80%, 85%, 90%, 95%, 96%, 97%, 98%, or 99% sequence identity to: a naturally occurring wild type CD39 or a CD39 (e.g., a functional fragment) thereof. In some embodiments, the CD39 molecule is a CD39 gene product, e.g., a CD39 polypeptide. In some embodiments, the variant, e.g., active variant, is a derivative, e.g., a mutant, of a wild type polypeptide. In some embodiments, the CD39 variant, e.g., active variant of CD39, has at least 50%, 60%, 70%, 80%, 85%, 90%, 95%, 96%, 97%, 98%, 99% or 100% activity of wild type CD39 polypeptide. In some embodiments, the CD39 molecule comprises a portion of CD39 (e.g., an extracellular portion of CD39) and a heterologous sequence, e.g., a sequence other than that of naturally occurring CD39.

[0358] Membrane anchoring moiety: As used herein, the term “membrane anchoring moiety” refers to a moiety that is capable of anchoring a molecule to a membrane. In some embodiments, the membrane anchoring moiety comprises a peptide or polypeptide that is capable of anchoring a molecule (e.g., a polypeptide) described herein to the cell membrane (e.g., the inside of the cell membrane). For example, a membrane anchoring moiety can target and link (e.g., covalently link) a polypeptide to lipids within the cell membrane. The membrane anchoring moiety can be coupled (e.g., fused) to the N-terminus or the C-terminus of the anchored polypeptide, e.g., to form a fusion protein. In some embodiments, the membrane anchoring moiety comprises a peptide or polypeptide derived from a lipid-anchored protein. Lipid-anchored proteins are typically located on the surface of the cell membrane and are covalently attached to lipids embedded within the cell membrane. In some embodiments, the membrane anchoring moiety comprises a peptide or polypeptide derived from a prenylated protein, a fatty acylated protein, or a glycosylphosphatidylinositol (GPI)-anchored protein. Exemplary membrane anchoring moieties include, but are not limited to, SRC anchoring moieties and RAS anchoring moieties. In some embodiments, the SRC anchoring moiety comprises the sequence of SEQ ID NO: 500, an amino acid sequence differing by no more than 1, 2, or 3 amino acids therefrom, or a functional fragment thereof. In some embodiments, the RAS anchoring moiety comprises the sequence of SEQ ID NO: 501, an amino acid sequence differing by no more than 1, 2, or 3 amino acids therefrom, or a functional fragment thereof.

[0359] In some embodiments, the molecule (e.g., polypeptide) anchored by the membrane anchoring moiety is not naturally anchored to the cell membrane, but rather is associated with the cell membrane.

[0360] Heterologous: As used herein, “heterologous” indicates that a sequence (e.g., an amino acid sequence or the polynucleotide that encodes an amino acid sequence) is not normally present in a given polypeptide or polynucleotide. For example, an amino acid sequence that corresponds to a domain or motif of one protein may be heterologous to a second protein. Isolated: As used herein, the term “isolated” refers to a substance or entity that has been separated from at least some of the components with which it was associated (whether in nature or in an experimental setting). Isolated substances may have varying levels of purity in reference to the substances from which they have been associated. Isolated substances and/or entities may be separated from at least about 10%, about 20%, about 30%, about 40%, about 50%, about 60%, about 70%, about 80%, about 90%, or more of the other components with which they were initially associated. In some embodiments, isolated agents are more than about 80%, about 85%, about 90%, about 91%, about 92%, about 93%, about 94%, about 95%, about 96%, about 97%, about 98%, about 99%, or more than about 99% pure. As used herein, a substance is “pure” if it is substantially free of other components.

[0361] Liposome: As used herein, by “liposome” is meant a structure including a lipid-containing membrane enclosing an aqueous interior. Liposomes may have one or more lipid membranes. Liposomes include single-layered liposomes (also known in the art as unilamellar liposomes) and multi-layered liposomes (also known in the art as multilamellar liposomes).

[0362] Modified: As used herein “modified” or “modification” refers to a changed state or a change in composition or structure of a polynucleotide (e.g., mRNA). Polynucleotides may be modified in various ways including chemically, structurally, and/or functionally. For example, polynucleotides may be structurally modified by the incorporation of one or more RNA elements, wherein the RNA element comprises a sequence and/or an RNA secondary structure(s) that provides one or more functions (e.g., translational regulatory activity). Accordingly, polynucleotides of the disclosure may be comprised of one or more modifications (e.g., may include one or more chemical, structural, or functional modifications, including any combination thereof).

[0363] Modified: As used herein “modified” refers to a changed state or structure of a molecule of the disclosure. Molecules may be modified in many ways including chemically, structurally, and functionally. In one embodiment, the mRNA molecules of the present disclosure are modified by the introduction of non-natural nucleosides and/or nucleotides, e.g., as it relates to the natural ribonucleotides A, U, G, and C. Noncanonical nucleotides such as the cap structures are not considered “modified” although they differ from the chemical structure of the A, C, G, U ribonucleotides.

[0364] mRNA: As used herein, an “mRNA” refers to a messenger ribonucleic acid. An mRNA may be naturally or non-naturally occurring. For example, an mRNA may include modified and/or non-naturally occurring components such as one or more nucleobases, nucleosides, nucleotides, or linkers. An mRNA may include a cap structure, a chain terminating nucleoside, a stem loop, a polyA sequence, and/or a polyadenylation signal. An mRNA may have a nucleotide sequence encoding a polypeptide. Translation of an mRNA, for example, in vivo translation of an mRNA inside a mammalian cell, may produce a polypeptide. Traditionally, the basic components of an mRNA molecule include at least a coding region, a 5′-untranslated region (5′-UTR), a 3′UTR, a 5′ cap and a polyA sequence.

[0365] Nanoparticle: As used herein, “nanoparticle” refers to a particle having any one structural feature on a scale of less than about 1000 nm that exhibits novel properties as compared to a bulk sample of the same material. Routinely, nanoparticles have any one structural feature on a scale of less than about 500 nm, less than about 200 nm, or about 100 nm. Also routinely, nanoparticles have any one structural feature on a scale of from about 50 nm to about 500 nm, from about 50 nm to about 200 nm or from about 70 to about 120 nm. In exemplary embodiments, a nanoparticle is a particle having one or more dimensions of the order of about 1-1000 nm. In other exemplary embodiments, a nanoparticle is a particle having one or more dimensions of the order of about 10-500 nm. In other exemplary embodiments, a nanoparticle is a particle having one or more dimensions of the order of about 50-200 nm. A spherical nanoparticle would have a diameter, for example, of between about 50-100 or 70-120 nanometers. A nanoparticle most often behaves as a unit in terms of its transport and properties. It is noted that novel properties that differentiate nanoparticles from the corresponding bulk material typically develop at a size scale of under 1000 nm, or at a size of about 100 nm, but nanoparticles can be of a larger size, for example, for particles that are oblong, tubular, and the like. Although the size of most molecules would fit into the above outline, individual molecules are usually not referred to as nanoparticles.

[0366] Nucleic acid. As used herein, the term “nucleic acid” is used in its broadest sense and encompasses any compound and/or substance that includes a polymer of nucleotides. These polymers are often referred to as polynucleotides. Exemplary nucleic acids or polynucleotides of the disclosure include, but are not limited to, ribonucleic acids (RNAs), deoxyribonucleic acids (DNAs), DNA-RNA hybrids, RNAi-inducing agents, RNAi agents, siRNAs, shRNAs, miRNAs, antisense RNAs, ribozymes, catalytic DNA, RNAs that induce triple helix formation, threose nucleic acids (TNAs), glycol nucleic acids (GNAs), peptide nucleic acids (PNAs), locked nucleic acids (LNAs, including LNA having a β-D-ribo configuration, α-LNA having an α-L-ribo configuration (a diastereomer of LNA), 2′-amino-LNA having a 2′-amino functionalization, and 2′-amino-α-LNA having a 2′-amino functionalization) or hybrids thereof.

[0367] Nucleic Acid Structure: As used herein, the term “nucleic acid structure” (used interchangeably with “polynucleotide structure”) refers to the arrangement or organization of atoms, chemical constituents, elements, motifs, and/or sequence of linked nucleotides, or derivatives or analogs thereof, that comprise a nucleic acid (e.g., an mRNA). The term also refers to the two-dimensional or three-dimensional state of a nucleic acid. Accordingly, the term “RNA structure” refers to the arrangement or organization of atoms, chemical constituents, elements, motifs, and/or sequence of linked nucleotides, or derivatives or analogs thereof, comprising an RNA molecule (e.g., an mRNA) and/or refers to a two-dimensional and/or three dimensional state of an RNA molecule. Nucleic acid structure can be further demarcated into four organizational categories referred to herein as “molecular structure”, “primary structure”, “secondary structure”, and “tertiary structure” based on increasing organizational complexity.

[0368] Nucleobase: As used herein, the term “nucleobase” (alternatively “nucleotide base” or “nitrogenous base”) refers to a purine or pyrimidine heterocyclic compound found in nucleic acids, including any derivatives or analogs of the naturally occurring purines and pyrimidines that confer improved properties (e.g., binding affinity, nuclease resistance, chemical stability) to a nucleic acid or a portion or segment thereof. Adenine, cytosine, guanine, thymine, and uracil are the nucleobases predominately found in natural nucleic acids. Other natural, non-natural, and/or synthetic nucleobases, as known in the art and/or described herein, can be incorporated into nucleic acids.

[0369] Nucleoside Nucleotide: As used herein, the term “nucleoside” refers to a compound containing a sugar molecule (e.g., a ribose in RNA or a deoxyribose in DNA), or derivative or analog thereof, covalently linked to a nucleobase (e.g., a purine or pyrimidine), or a derivative or analog thereof (also referred to herein as “nucleobase”), but lacking an internucleoside linking group (e.g., a phosphate group). As used herein, the term “nucleotide” refers to a nucleoside covalently bonded to an internucleoside linking group (e.g., a phosphate group), or any derivative, analog, or modification thereof that confers improved chemical and/or functional properties (e.g., binding affinity, nuclease resistance, chemical stability) to a nucleic acid or a portion or segment thereof.

[0370] Open Reading Frame: As used herein, the term “open reading frame,” abbreviated as “ORF,” refers to a segment or region of an mRNA molecule that encodes a polypeptide. The ORF comprises a continuous stretch of non-overlapping, in-frame codons, beginning with the initiation codon and ending with a stop codon, and is translated by the ribosome.

[0371] Patient: As used herein, “patient” refers to a subject who may seek or be in need of treatment, requires treatment, is receiving treatment, will receive treatment, or a subject who is under care by a trained professional for a particular disease or condition. In particular embodiments, a patient is a human patient. In some embodiments, a patient is a patient suffering from ancourt of appeals autoimmune disease, e.g., as described herein.

[0372] Pharmaceutically acceptable: The phrase “pharmaceutically acceptable” is employed herein to refer to those compounds, materials, compositions, and/or dosage forms which are, within the scope of sound medical judgment, suitable for use in contact with the tissues of human beings and animals without excessive toxicity, irritation, allergic response, or other problem or complication, commensurate with a reasonable benefit/risk ratio.

[0373] Pharmaceutically acceptable excipient: The phrase “pharmaceutically acceptable excipient,” as used herein, refers any ingredient other than the compounds described herein (for example, a vehicle capable of suspending or dissolving the active compound) and having the properties of being substantially nontoxic and non-inflammatory in a patient. Excipients may include, for example: antiadherents, antioxidants, binders, coatings, compression aids, disintegrants, dyes (colors), emollients, emulsifiers, fillers (diluents), film formers or coatings, flavors, fragrances, glidants (flow enhancers), lubricants, preservatives, printing inks, sorbents, suspensing or dispersing agents, sweeteners, and waters of hydration. Exemplary excipients include, but are not limited to: butylated hydroxytoluene (BHT), calcium carbonate, calcium phosphate (dibasic), calcium stearate, croscarmellose, crosslinked polyvinyl pyrrolidone, citric acid, crospovidone, cysteine, ethylcellulose, gelatin, hydroxypropyl cellulose, hydroxypropyl methylcellulose, lactose, magnesium stearate, maltitol, mannitol, methionine, methylcellulose, methyl paraben, microcrystalline cellulose, polyethylene glycol, polyvinyl pyrrolidone, povidone, pregelatinized starch, propyl paraben, retinyl palmitate, shellac, silicon dioxide, sodium carboxymethyl cellulose, sodium citrate, sodium starch glycolate, sorbitol, starch (corn), stearic acid, sucrose, talc, titanium dioxide, vitamin A, vitamin E, vitamin C, and xylitol.

[0374] Pharmaceutically acceptable salts: As used herein, “pharmaceutically acceptable salts” refers to derivatives of the disclosed compounds wherein the parent compound is modified by converting an existing acid or base moiety to its salt form (e.g., by reacting the free base group with a suitable organic acid). Examples of pharmaceutically acceptable salts include, but are not limited to, mineral or organic acid salts of basic residues such as amines; alkali or organic salts of acidic residues such as carboxylic acids; and the like. Representative acid addition salts include acetate, acetic acid, adipate, alginate, ascorbate, aspartate, benzenesulfonate, benzene sulfonic acid, benzoate, bisulfate, borate, butyrate, camphorate, camphorsulfonate, citrate, cyclopentanepropionate, digluconate, dodecylsulfate, ethanesulfonate, fumarate, glucoheptonate, glycerophosphate, hemisulfate, heptonate, hexanoate, hydrobromide, hydrochloride, hydroiodide, 2-hydroxy-ethanesulfonate, lactobionate, lactate, laurate, lauryl sulfate, malate, maleate, malonate, methanesulfonate, 2-naphthalenesulfonate, nicotinate, nitrate, oleate, oxalate, palmitate, pamoate, pectinate, persulfate, 3-phenylpropionate, phosphate, picrate, pivalate, propionate, stearate, succinate, sulfate, tartrate, thiocyanate, toluenesulfonate, undecanoate, valerate salts, and the like. Representative alkali or alkaline earth metal salts include sodium, lithium, potassium, calcium, magnesium, and the like, as well as nontoxic ammonium, quaternary ammonium, and amine cations, including, but not limited to ammonium, tetramethylammonium, tetraethylammonium, methylamine, dimethylamine, trimethylamine, triethylamine, ethylamine, and the like. The pharmaceutically acceptable salts of the present disclosure include the conventional non-toxic salts of the parent compound formed, for example, from non-toxic inorganic or organic acids. The pharmaceutically acceptable salts of the present disclosure can be synthesized from the parent compound which contains a basic or acidic moiety by conventional chemical methods. Generally, such salts can be prepared by reacting the free acid or base forms of these compounds with a stoichiometric amount of the appropriate base or acid in water or in an organic solvent, or in a mixture of the two; generally, nonaqueous media like ether, ethyl acetate, ethanol, isopropanol, or acetonitrile are preferred. Lists of suitable salts are found in Remington's Pharmaceutical Sciences, 17th ed., Mack Publishing Company, Easton, Pa., 1985, p. 1418, Pharmaceutical Salts: Properties, Selection, and Use, P. H. Stahl and C. G. Wermuth (eds.), Wiley-VCH, 2008, and Berge et al., Journal of Pharmaceutical Science, 66, 1-19 (1977), each of which is incorporated herein by reference in its entirety.

[0375] Polypeptide: As used herein, the term “polypeptide” or “polypeptide of interest” refers to a polymer of amino acid residues typically joined by peptide bonds that can be produced naturally (e.g., isolated or purified) or synthetically.

[0376] RNA: As used herein, an “RNA” refers to a ribonucleic acid that may be naturally or non-naturally occurring. For example, an RNA may include modified and/or non-naturally occurring components such as one or more nucleobases, nucleosides, nucleotides, or linkers. An RNA may include a cap structure, a chain terminating nucleoside, a stem loop, a polyA sequence, and/or a polyadenylation signal. An RNA may have a nucleotide sequence encoding a polypeptide of interest. For example, an RNA may be a messenger RNA (mRNA). Translation of an mRNA encoding a particular polypeptide, for example, in vivo translation of an mRNA inside a mammalian cell, may produce the encoded polypeptide. RNAs may be selected from the non-liming group consisting of small interfering RNA (siRNA), asymmetrical interfering RNA (aiRNA), microRNA (miRNA), Dicer-substrate RNA (dsRNA), small hairpin RNA (shRNA), mRNA, long non-coding RNA (lncRNA) and mixtures thereof.

[0377] RNA element: As used herein, the term “RNA element” refers to a portion, fragment, or segment of an RNA molecule that provides a biological function and/or has biological activity (e.g., translational regulatory activity). Modification of a polynucleotide by the incorporation of one or more RNA elements, such as those described herein, provides one or more desirable functional properties to the modified polynucleotide. RNA elements, as described herein, can be naturally occurring, non-naturally occurring, synthetic, engineered, or any combination thereof. For example, naturally occurring RNA elements that provide a regulatory activity include elements found throughout the transcriptomes of viruses, prokaryotic and eukaryotic organisms (e.g., humans). RNA elements in particular eukaryotic mRNAs and translated viral RNAs have been shown to be involved in mediating many functions in cells. Exemplary natural RNA elements include, but are not limited to, translation initiation elements (e.g., internal ribosome entry site (IRES), see Kieft et al., (2001) RNA 7(2):194-206), translation enhancer elements (e.g., the APP mRNA translation enhancer element, see Rogers et al., (1999) J Biol Chem 274(10):6421-6431), mRNA stability elements (e.g., AU-rich elements (AREs), see Garneau et al., (2007) Nat Rev Mol Cell Biol 8(2):113-126), translational repression element (see e.g., Blumer et al., (2002) Mech Dev 110(1-2):97-112), protein-binding RNA elements (e.g., iron-responsive element, see Selezneva et al., (2013) J Mol Biol 425(18):3301-3310), cytoplasmic polyadenylation elements (Villalba et al., (2011) Curr Opin Genet Dev 21(4):452-457), and catalytic RNA elements (e.g., ribozymes, see Scott et al., (2009) Biochim Biophys Acta 1789(9-10):634-641).

[0378] Specific delivery: As used herein, the term “specific delivery,” “specifically deliver,” or “specifically delivering” means delivery of more (e.g., at least 10% more, at least 20% more, at least 30% more, at least 40% more, at least 50% more, at least 1.5 fold more, at least 2-fold more, at least 3-fold more, at least 4-fold more, at least 5-fold more, at least 6-fold more, at least 7-fold more, at least 8-fold more, at least 9-fold more, at least 10-fold more) of a therapeutic and/or prophylactic by a nanoparticle to a target cell of interest (e.g., mammalian target cell) compared to an off-target cell (e.g., non-target cells). The level of delivery of a nanoparticle to a particular cell may be measured by comparing the amount of protein produced in target cells versus non-target cells (e.g., by mean fluorescence intensity using flow cytometry, comparing the % of target cells versus non-target cells expressing the protein (e.g., by quantitative flow cytometry), comparing the amount of protein produced in a target cell versus non-target cell to the amount of total protein in said target cells versus non-target cell, or comparing the amount of therapeutic and/or prophylactic in a target cell versus non-target cell to the amount of total therapeutic and/or prophylactic in said target cell versus non-target cell. It will be understood that the ability of a nanoparticle to specifically deliver to a target cell need not be determined in a subject being treated, it may be determined in a surrogate such as an animal model (e.g., a mouse or NHP model).

[0379] Substantially: As used herein, the term “substantially” refers to the qualitative condition of exhibiting total or near-total extent or degree of a characteristic or property of interest. One of ordinary skill in the biological arts will understand that biological and chemical phenomena rarely, if ever, go to completion and/or proceed to completeness or achieve or avoid an absolute result. The term “substantially” is therefore used herein to capture the potential lack of completeness inherent in many biological and chemical phenomena.

[0380] Suffering from: An individual who is “suffering from” a disease, disorder, and/or condition has been diagnosed with or displays one or more symptoms of a disease, disorder, and/or condition.

[0381] Targeting moiety: As used herein, a “targeting moiety” is a compound or agent that may target a nanoparticle to a particular cell, tissue, and/or organ type.

[0382] Therapeutic Agent: The term “therapeutic agent” refers to any agent that, when administered to a subject, has a therapeutic, diagnostic, and/or prophylactic effect and/or elicits a desired biological and/or pharmacological effect.

[0383] Transfection: As used herein, the term “transfection” refers to methods to introduce a species (e.g., a polynucleotide, such as a mRNA) into a cell.

[0384] Subject: As used herein, the term “subject” refers to any organism to which a composition in accordance with the disclosure may be administered, e.g., for experimental, diagnostic, prophylactic, and/or therapeutic purposes. Typical subjects include animals (e.g., mammals such as mice, rats, rabbits, non-human primates, and humans) and/or plants. In some embodiments, a subject may be a patient.

[0385] Treating: As used herein, the term “treating” refers to partially or completely alleviating, ameliorating, improving, relieving, delaying onset of, inhibiting progression of, reducing severity of, and/or reducing incidence of one or more symptoms or features of a particular infection, disease, disorder, and/or condition. For example, “treating” cancer may refer to inhibiting survival, growth, and/or spread of a tumor. Treatment may be administered to a subject who does not exhibit signs of a disease, disorder, and/or condition and/or to a subject who exhibits only early signs of a disease, disorder, and/or condition for the purpose of decreasing the risk of developing pathology associated with the disease, disorder, and/or condition.

[0386] Preventing: As used herein, the term “preventing” refers to partially or completely inhibiting the onset of one or more symptoms or features of a particular infection, disease, disorder, and/or condition.

[0387] Unmodified: As used herein, “unmodified” refers to any substance, compound or molecule prior to being changed in any way. Unmodified may, but does not always, refer to the wild type or native form of a biomolecule. Molecules may undergo a series of modifications whereby each modified molecule may serve as the “unmodified” starting molecule for a subsequent modification.

[0388] Variant: As used herein, the term “variant” refers to a molecule having at least 50%, 60%, 70%, 80%, 85%, 90%, 95%, 96%, 97%, 98%, 99% or 100% activity of the wild type molecule, e.g., as measured by an art-recognized assay.

### Exemplary Metabolic Reprograming Molecules

[0389] Exemplary metabolic reprogramming molecules include, but are not limited to, an IDO molecule (e.g., IDO1 and/or IDO2); a TDO molecule; an AMPK molecule; an Aryl hydrocarbon receptor (AhR) molecule (e.g., a constitutively active AhR (CA-Ahr)); an ALDH1A2 molecule; a HMOX1 molecule; an Arginase molecule; a CD73 molecule; or a CD39 molecule. Each of these metabolic reprogramming molecules are described in further detail below.

[0390] In an embodiment, the metabolic reprogramming molecule is a chimeric molecule, e.g., comprising a metabolic reprogramming molecule portion and a non-metabolic reprogramming molecule portion, e.g., a membrane anchoring moiety. In an embodiment, the metabolic reprogramming molecule encoded by the polynucleotide is a chimeric molecule, e.g., the polynucleotide further comprises a nucleotide sequence encoding a non-metabolic reprogramming portion of the molecule, e.g., a membrane anchoring moiety.

### IDO Molecule

[0391] Indoleamine-pyrrole 2,3-dioxygenase (IDO), is an intracellular monomeric, heme-containing enzyme that controls the breakdown of Tryptophan in the Kynurenine pathway (Cemil B and Sarisozen C (2017) Journal of Oncological Sciences 3:2 pp. 52-56). There are two isoforms of IDO, IDO1 and IDO2, which both convert Tryptophan to Kynurenine at different enzymatic rates. IDO2 is narrowly expressed and IDO1 is more broadly expressed, e.g., in endothelial cells, antigen presenting cells, fibroblasts, macrophages and dendritic cells.

[0392] In an aspect, the disclosure provides an LNP composition comprising a polynucleotide, e.g., encoding an IDO molecule, e.g., IDO1 or IDO2, e.g., as described herein.

[0393] In an embodiment, the IDO molecule comprises IDO1. In an embodiment the IDO molecule comprises a naturally occurring IDO1 molecule, a fragment (e.g., a functional fragment, e.g., a biologically active fragment) of a naturally occurring IDO1 molecule, or a variant thereof. In an embodiment, the IDO molecule comprises a variant of a naturally occurring IDO1 molecule (e.g., an IDO1 variant, e.g., as described herein), or a fragment thereof. In an embodiment, the LNP composition comprising a polynucleotide encoding an IDO1 molecule can be administered alone or in combination with an additional agent, e.g., an LNP composition comprising a polynucleotide encoding a different metabolic reprogramming molecule or an LNP composition comprising a polynucleotide encoding a different molecule.

[0394] In an aspect, an LNP composition disclosed herein comprises a polynucleotide encoding an IDO molecule, e.g., IDO1. In an embodiment, the IDO molecule comprises an IDO (e.g., IDO1) amino acid sequence described herein or an amino acid sequence having at least 85%, 90%, 95%, 96%, 97%, 98%, 99% identity to an IDO (e.g., IDO1) amino acid sequence described herein. In an embodiment, the IDO molecule comprises an amino acid sequence having at least 85%, 90%, 95%, 96%, 97%, 98%, 99%, or 100% identity to an IDO amino acid sequence provided in Table 1A, e.g., any one of SEQ ID NOs: 1, 4, 6, 16, or 18, or a functional fragment thereof. In an embodiment, the IDO molecule comprises the amino acid sequence of an IDO amino acid sequence provided in Table 1A, e.g., any one of SEQ ID NOs: 1, 4, 6, 16, or 18, or a functional fragment thereof. In an embodiment, the IDO molecule comprises the amino acid sequence of any one of SEQ ID NOs: 1, 4, 6, 16, or 18, or a functional fragment thereof. In an embodiment, the IDO molecule comprises an amino acid sequence having at least 85%, 90%, 95%, 96%, 97%, 98%, 99% or 100% identity to amino acids 2-436 of SEQ ID NO: 1; amino acids 2-422 of SEQ ID NO: 4; or amino acids 2-403 of SEQ ID NO: 6; amino acids 2-434 of SEQ ID NO: 16; or amino acids 2-422 of SEQ ID NO: 18, or a functional fragment thereof. In an embodiment, the IDO molecule comprises amino acids 2-436 of SEQ ID NO: 1; amino acids 2-422 of SEQ ID NO: 4; or amino acids 2-403 of SEQ ID NO: 6; amino acids 2-434 of SEQ ID NO: 16; or amino acids 2-422 of SEQ ID NO: 18, or a functional fragment thereof. In an embodiment, the IDO molecule comprises amino acids 2-436 of SEQ ID NO: 1; amino acids 2-422 of SEQ ID NO: 4; or amino acids 2-403 of SEQ ID NO: 6; amino acids 2-434 of SEQ ID NO: 16; or amino acids 2-422 of SEQ ID NO: 18, or a functional fragment thereof. In an embodiment, the IDO molecule comprises amino acids 2-436 of SEQ ID NO: 1; amino acids 2-422 of SEQ ID NO: 4; or amino acids 2-403 of SEQ ID NO: 6; amino acids 2-434 of SEQ ID NO: 16; or amino acids 2-422 of SEQ ID NO: 18, or a functional fragment thereof.

[0395] In an embodiment, the IDO molecule comprises an amino acid sequence for a leader sequence and/or an affinity tag (e.g., a leader sequence described herein and/or an affinity tag described herein). In an embodiment, the IDO molecule does not comprise an amino acid sequence for a leader sequence and/or an affinity tag (e.g., a leader sequence described herein and/or an affinity tag described herein).

[0396] In an embodiment, the polynucleotide encoding the IDO molecule and optionally, the membrane anchoring moiety comprises a nucleotide sequence (e.g., a codon-optimized nucleotide sequence) having at least 50%, 55%, 60%, 65%, 70%, 75%, 80%, 85%, 90%, 95%, 96%, 97%, 98%, 99% or 100% identity to the sequence of any one of SEQ ID NOs: 2, 3, 24, 5, 7, 17, 19, or 300-318, or a functional fragment thereof, or at least 50%, 55%, 60%, 65%, 70%, 75%, 80%, 85%, 90%, 95%, 96%, 97%, 98%, 99% or 100% identity to nucleotides 4-1308 of SEQ ID NO: 2; nucleotides 4-1308 of SEQ ID NO: 3; nucleotides 4-1308 of SEQ ID NO: 24; nucleotides 4-1266 of SEQ ID NO: 5; nucleotides 4-1209 of SEQ ID NO: 7; nucleotides 4-1302 of SEQ ID NO: 17; or nucleotides 4-1266 of SEQ ID NO: 19. In an embodiment, the polynucleotide (e.g., mRNA) encoding the IDO molecule and optionally, the membrane anchoring moiety comprises the nucleotide sequence of any one of SEQ ID NOs: 2, 3, 24, 5, 7, 17, 19, or 300-318, or a functional fragment thereof, or at least 50%, 55%, 60%, 65%, 70%, 75%, 80%, 85%, 90%, 95%, 96%, 97%, 98%, 99% or 100% identity to nucleotides 4-1308 of SEQ ID NO: 2; nucleotides 4-1308 of SEQ ID NO: 3; nucleotides 4-1308 of SEQ ID NO: 24; nucleotides 4-1266 of SEQ ID NO: 5; nucleotides 4-1209 of SEQ ID NO: 7; nucleotides 4-1302 of SEQ ID NO: 17; or nucleotides 4-1266 of SEQ ID NO: 19, or a functional fragment thereof.

[0397] In an embodiment, the polynucleotide (e.g., mRNA) encoding the IDO molecule and optionally, the membrane anchoring moiety comprises a nucleotide sequence that encodes for a leader sequence and/or an affinity tag (e.g., a leader sequence described herein and/or an affinity tag described herein). In an embodiment, the polynucleotide (e.g., mRNA) encoding the IDO molecule and optionally, the membrane anchoring moiety does not comprise a nucleotide sequence that encodes for a leader sequence and/or an affinity tag (e.g., a leader sequence described herein and/or an affinity tag described herein).

[0398] In an embodiment, the polynucleotide (e.g., mRNA) encoding the IDO molecule further comprises one or more elements, e.g., a 5′ UTR and/or a 3′ UTR (e.g., a 5′ UTR described herein and/or a 3′ UTR described herein). In an embodiment, the 5′ UTR and/or 3′UTR comprise one or more micro RNA (mIR) binding sites, e.g., as disclosed herein. Exemplary 5′ UTRs and 3′ UTRs are disclosed in the section entitled “5′ UTR and 3′UTR” herein.

[0399] In some embodiments, the polynucleotide comprising an mRNA nucleotide sequence encoding the IDO polypeptide and the membrane anchoring moiety comprises the nucleotide sequence of SEQ ID NO: 300, which consists of from 5′ to 3′ end: 5′ UTR of SEQ ID NO: 50, ORF sequence of SEQ ID NO: 3, and 3′ UTR of SEQ ID NO: 140.

[0400] In some embodiments, the polynucleotide encoding the IDO molecule comprises from 5′ to 3′ end
[0401] (i) a 5′ cap such as provided herein, e.g., Cap C₁;
[0402] (ii) a 5′ UTR, such as the sequences provided herein, for example, SEQ ID NO: 50;
[0403] (iii) an open reading frame encoding an IDO polypeptide, e.g., a sequence optimized nucleic acid sequence encoding IDO set forth as SEQ ID NO: 3;
[0404] (iv) at least one stop codon (if not present at 5′ terminus of 3′UTR);
[0405] (v) a 3′ UTR, such as the sequences provided herein, for example, SEQ ID NO: 140; and
[0406] (vi) a poly-A tail provided herein (e.g., SEQ ID NO: 502).

[0407] In some embodiments, the polynucleotide comprising an mRNA nucleotide sequence encoding the IDO polypeptide and the membrane anchoring moiety comprises the nucleotide sequence of SEQ ID NO: 301, which consists of from 5′ to 3′ end: 5′ UTR of SEQ ID NO: 50, ORF sequence of SEQ ID NO: 3, and 3′ UTR of SEQ ID NO: 140.

[0408] In some embodiments, the polynucleotide encoding the IDO molecule comprises from 5′ to 3′ end
[0409] (i) a 5′ cap such as provided herein, e.g., Cap C1;
[0410] (ii) a 5′ UTR, such as the sequences provided herein, for example, SEQ ID NO: 50;
[0411] (iii) an open reading frame encoding an IDO polypeptide, e.g., a sequence optimized nucleic acid sequence encoding IDO set forth as SEQ ID NO: 3;
[0412] (iv) at least one stop codon (if not present at 5′ terminus of 3′UTR);
[0413] (v) a 3′ UTR, such as the sequences provided herein, for example, SEQ ID NO: 140; and
[0414] (vi) a poly-A tail provided herein (e.g., SEQ ID NO: 209).

[0415] In some embodiments, the polynucleotide comprising an mRNA nucleotide sequence encoding the IDO polypeptide and the membrane anchoring moiety comprises the nucleotide sequence of SEQ ID NO: 302, which consists of from 5′ to 3′ end: 5′ UTR of SEQ ID NO: 50, ORF sequence of SEQ ID NO: 3, and 3′ UTR of SEQ ID NO: 141.

[0416] In some embodiments, the polynucleotide encoding the IDO molecule comprises from 5′ to 3′ end
[0417] (i) a 5′ cap such as provided herein, e.g., Cap C1;
[0418] (ii) a 5′ UTR, such as the sequences provided herein, for example, SEQ ID NO:50;
[0419] (iii) an open reading frame encoding an IDO polypeptide, e.g., a sequence optimized nucleic acid sequence encoding IDO set forth as SEQ ID NO: 3;
[0420] (iv) at least one stop codon (if not present at 5′ terminus of 3′UTR);
[0421] (v) a 3′ UTR, such as the sequences provided herein, for example, SEQ ID NO:141; and
[0422] (vi) a poly-A tail provided herein (e.g., SEQ ID NO: 502).

[0423] In some embodiments, the polynucleotide comprising an mRNA nucleotide sequence encoding the IDO polypeptide and the membrane anchoring moiety comprises the nucleotide sequence of SEQ ID NO: 303, which consists of from 5′ to 3′ end: 5′ UTR of SEQ ID NO: 50, ORF sequence of SEQ ID NO: 3, and 3′ UTR of SEQ ID NO: 141.

[0424] In some embodiments, the polynucleotide encoding the IDO molecule comprises from 5′ to 3′ end
[0425] (i) a 5′ cap such as provided herein, e.g., Cap C1;
[0426] (ii) a 5′ UTR, such as the sequences provided herein, for example, SEQ ID NO: 50;
[0427] (iii) an open reading frame encoding an IDO polypeptide, e.g., a sequence optimized nucleic acid sequence encoding IDO set forth as SEQ ID NO: 3;
[0428] (iv) at least one stop codon (if not present at 5′ terminus of 3′UTR);
[0429] (v) a 3′ UTR, such as the sequences provided herein, for example, SEQ ID NO:141; and
[0430] (vi) a poly-A tail provided herein (e.g., SEQ ID NO: 209).

[0431] In some embodiments, the polynucleotide comprising an mRNA nucleotide sequence encoding the IDO polypeptide and the membrane anchoring moiety comprises the nucleotide sequence of SEQ ID NO: 304, which consists of from 5′ to 3′ end: 5′ UTR of SEQ ID NO: 50, ORF sequence of SEQ ID NO: 2, and 3′ UTR of SEQ ID NO: 141.

[0432] In some embodiments, the polynucleotide encoding the IDO molecule comprises from 5′ to 3′ end
[0433] (i) a 5′ cap such as provided herein, e.g., Cap C1;
[0434] (ii) a 5′ UTR, such as the sequences provided herein, for example, SEQ ID NO: 80;
[0435] (iii) an open reading frame encoding an IDO polypeptide, e.g., a sequence optimized nucleic acid sequence encoding IDO set forth as SEQ ID NO: 2;
[0436] (iv) at least one stop codon (if not present at 5′ terminus of 3′UTR);
[0437] (v) a 3′ UTR, such as the sequences provided herein, for example, SEQ ID NO: 141; and
[0438] (vi) a poly-A tail provided herein (e.g., SEQ ID NO: 502).

[0439] In some embodiments, the polynucleotide comprising an mRNA nucleotide sequence encoding the IDO polypeptide and the membrane anchoring moiety comprises the nucleotide sequence of SEQ ID NO: 305, which consists of from 5′ to 3′ end: 5′ UTR of SEQ ID NO: 50, ORF sequence of SEQ ID NO: 2, and 3′ UTR of SEQ ID NO: 141.

[0440] In some embodiments, the polynucleotide encoding the IDO molecule comprises from 5′ to 3′ end
[0441] (i) a 5′ cap such as provided herein, e.g., Cap C1;
[0442] (ii) a 5′ UTR, such as the sequences provided herein, for example, SEQ ID NO: 50;
[0443] (iii) an open reading frame encoding an IDO polypeptide, e.g., a sequence optimized nucleic acid sequence encoding IDO set forth as SEQ ID NO: 2;
[0444] (iv) at least one stop codon (if not present at 5′ terminus of 3′UTR);
[0445] (v) a 3′ UTR, such as the sequences provided herein, for example, SEQ ID NO: 141; and
[0446] (vi) a poly-A tail provided herein (e.g., SEQ ID NO: 209).

[0447] In some embodiments, the polynucleotide comprising an mRNA nucleotide sequence encoding the IDO polypeptide and the membrane anchoring moiety comprises the nucleotide sequence of SEQ ID NO: 306, which consists of from 5′ to 3′ end: 5′ UTR of SEQ ID NO: 50, ORF sequence of SEQ ID NO: 2, and 3′ UTR of SEQ ID NO: 108.

[0448] In some embodiments, the polynucleotide encoding the IDO molecule comprises from 5′ to 3′ end
[0449] (i) a 5′ cap such as provided herein, e.g., Cap C1;
[0450] (ii) a 5′ UTR, such as the sequences provided herein, for example, SEQ ID NO: 50;
[0451] (iii) an open reading frame encoding an IDO polypeptide, e.g., a sequence optimized nucleic acid sequence encoding IDO set forth as SEQ ID NO: 2;
[0452] (iv) at least one stop codon (if not present at 5′ terminus of 3′UTR);
[0453] (v) a 3′ UTR, such as the sequences provided herein, for example, SEQ ID NO: 108; and
[0454] (vi) a poly-A tail provided herein (e.g., SEQ ID NO: 502).

[0455] In some embodiments, the polynucleotide comprising an mRNA nucleotide sequence encoding the IDO polypeptide and the membrane anchoring moiety comprises the nucleotide sequence of SEQ ID NO: 307, which consists of from 5′ to 3′ end: 5′ UTR of SEQ ID NO: 50, ORF sequence of SEQ ID NO: 2, and 3′ UTR of SEQ ID NO: 140.

[0456] In some embodiments, the polynucleotide encoding the IDO molecule comprises from 5′ to 3′ end
[0457] (i) a 5′ cap such as provided herein, e.g., Cap C1;
[0458] (ii) a 5′ UTR, such as the sequences provided herein, for example, SEQ ID NO: 50;
[0459] (iii) an open reading frame encoding an IDO polypeptide, e.g., a sequence optimized nucleic acid sequence encoding IDO set forth as SEQ ID NO: 2;
[0460] (iv) at least one stop codon (if not present at 5′ terminus of 3′UTR);
[0461] (v) a 3′ UTR, such as the sequences provided herein, for example, SEQ ID NO: 140; and
[0462] (vi) a poly-A tail provided herein (e.g., SEQ ID NO: 502).

[0463] In some embodiments, the polynucleotide comprising an mRNA nucleotide sequence encoding the IDO polypeptide and the membrane anchoring moiety comprises the nucleotide sequence of SEQ ID NO: 308, which consists of from 5′ to 3′ end: 5′ UTR of SEQ ID NO: 50, ORF sequence of SEQ ID NO: 3, and 3′ UTR of SEQ ID NO: 108.

[0464] In some embodiments, the polynucleotide encoding the IDO molecule comprises from 5′ to 3′ end
[0465] (i) a 5′ cap such as provided herein, e.g., Cap C1;
[0466] (ii) a 5′ UTR, such as the sequences provided herein, for example, SEQ ID NO: 50;
[0467] (iii) an open reading frame encoding an IDO polypeptide, e.g., a sequence optimized nucleic acid sequence encoding IDO set forth as SEQ ID NO: 3;
[0468] (iv) at least one stop codon (if not present at 5′ terminus of 3′UTR);
[0469] (v) a 3′ UTR, such as the sequences provided herein, for example, SEQ ID NO: 108; and
[0470] (vi) a poly-A tail provided herein (e.g., SEQ ID NO: 502).

[0471] In some embodiments, the polynucleotide comprising an mRNA nucleotide sequence encoding the IDO polypeptide and the membrane anchoring moiety comprises the nucleotide sequence of SEQ ID NO: 309, which consists of from 5′ to 3′ end: 5′ UTR of SEQ ID NO: 50, ORF sequence of SEQ ID NO: 3, and 3′ UTR of SEQ ID NO: 100.

[0472] In some embodiments, the polynucleotide encoding the IDO molecule comprises from 5′ to 3′ end
[0473] (i) a 5′ cap such as provided herein, e.g., Cap C1;
[0474] (ii) a 5′ UTR, such as the sequences provided herein, for example, SEQ ID NO: 50;
[0475] (iii) an open reading frame encoding an IDO polypeptide, e.g., a sequence optimized nucleic acid sequence encoding IDO set forth as SEQ ID NO: 3;
[0476] (iv) at least one stop codon (if not present at 5′ terminus of 3′UTR);
[0477] (v) a 3′ UTR, such as the sequences provided herein, for example, SEQ ID NO: 100; and
[0478] (vi) a poly-A tail provided herein (e.g., SEQ ID NO: 502).

[0479] In some embodiments, the polynucleotide comprising an mRNA nucleotide sequence encoding the IDO polypeptide and the membrane anchoring moiety comprises the nucleotide sequence of SEQ ID NO: 310, which consists of from 5′ to 3′ end: 5′ UTR of SEQ ID NO: 50, ORF sequence of SEQ ID NO: 24, and 3′ UTR of SEQ ID NO: 108.

[0480] In some embodiments, the polynucleotide encoding the IDO molecule comprises from 5′ to 3′ end
[0481] (i) a 5′ cap such as provided herein, e.g., Cap C1;
[0482] (ii) a 5′ UTR, such as the sequences provided herein, for example, SEQ ID NO: 50;
[0483] (iii) an open reading frame encoding an IDO polypeptide, e.g., a sequence optimized nucleic acid sequence encoding IDO set forth as SEQ ID NO: 24;
[0484] (iv) at least one stop codon (if not present at 5′ terminus of 3′UTR);
[0485] (v) a 3′ UTR, such as the sequences provided herein, for example, SEQ ID NO: 108; and
[0486] (vi) a poly-A tail provided herein (e.g., SEQ ID NO: 502).

[0487] In some embodiments, the polynucleotide comprising an mRNA nucleotide sequence encoding the IDO polypeptide and the membrane anchoring moiety comprises the nucleotide sequence of SEQ ID NO: 311, which consists of from 5′ to 3′ end: 5′ UTR of SEQ ID NO: 50, ORF sequence of SEQ ID NO: 5, and 3′ UTR of SEQ ID NO: 140.

[0488] In some embodiments, the polynucleotide encoding the IDO molecule comprises from 5′ to 3′ end
[0489] (i) a 5′ cap such as provided herein, e.g., Cap C1;
[0490] (ii) a 5′ UTR, such as the sequences provided herein, for example, SEQ ID NO: 50;
[0491] (iii) an open reading frame encoding an IDO polypeptide, e.g., a sequence optimized nucleic acid sequence encoding IDO set forth as SEQ ID NO: 5;
[0492] (iv) at least one stop codon (if not present at 5′ terminus of 3′UTR);
[0493] (v) a 3′ UTR, such as the sequences provided herein, for example, SEQ ID NO: 140; and
[0494] (vi) a poly-A tail provided herein (e.g., SEQ ID NO: 502).

[0495] In some embodiments, the polynucleotide comprising an mRNA nucleotide sequence encoding the IDO polypeptide and the membrane anchoring moiety comprises the nucleotide sequence of SEQ ID NO: 312, which consists of from 5′ to 3′ end: 5′ UTR of SEQ ID NO: 50, ORF sequence of SEQ ID NO: 5, and 3′ UTR of SEQ ID NO: 141.

[0496] In some embodiments, the polynucleotide encoding the IDO molecule comprises from 5′ to 3′ end
[0497] (i) a 5′ cap such as provided herein, e.g., Cap C1;
[0498] (ii) a 5′ UTR, such as the sequences provided herein, for example, SEQ ID NO: 50;
[0499] (iii) an open reading frame encoding an IDO polypeptide, e.g., a sequence optimized nucleic acid sequence encoding IDO set forth as SEQ ID NO: 5;
[0500] (iv) at least one stop codon (if not present at 5′ terminus of 3′UTR);
[0501] (v) a 3′ UTR, such as the sequences provided herein, for example, SEQ ID NO: 141; and
[0502] (vi) a poly-A tail provided herein (e.g., SEQ ID NO: 502).

[0503] In some embodiments, the polynucleotide comprising an mRNA nucleotide sequence encoding the IDO polypeptide and the membrane anchoring moiety comprises the nucleotide sequence of SEQ ID NO: 313, which consists of from 5′ to 3′ end: 5′ UTR of SEQ ID NO: 50, ORF sequence of SEQ ID NO: 5, and 3′ UTR of SEQ ID NO: 140.

[0504] In some embodiments, the polynucleotide encoding the IDO molecule comprises from 5′ to 3′ end
[0505] (i) a 5′ cap such as provided herein, e.g., m7GpppGmAG tetranucleotide cap;
[0506] (ii) a 5′ UTR, such as the sequences provided herein, for example, SEQ ID NO: 50;
[0507] (iii) an open reading frame encoding an IDO polypeptide, e.g., a sequence optimized nucleic acid sequence encoding IDO set forth as SEQ ID NO: 5;
[0508] (iv) at least one stop codon (if not present at 5′ terminus of 3′UTR);
[0509] (v) a 3′ UTR, such as the sequences provided herein, for example, SEQ ID NO: 140; and
[0510] (vi) a poly-A tail provided herein (e.g., SEQ ID NO: 502).

[0511] In some embodiments, the polynucleotide comprising an mRNA nucleotide sequence encoding the IDO polypeptide and the membrane anchoring moiety comprises the nucleotide sequence of SEQ ID NO: 314, which consists of from 5′ to 3′ end: 5′ UTR of SEQ ID NO: 50, ORF sequence of SEQ ID NO: 5, and 3′ UTR of SEQ ID NO: 141.

[0512] In some embodiments, the polynucleotide encoding the IDO molecule comprises from 5′ to 3′ end
[0513] (i) a 5′ cap such as provided herein, e.g., m7GpppGmAG tetranucleotide cap;
[0514] (ii) a 5′ UTR, such as the sequences provided herein, for example, SEQ ID NO: 50;
[0515] (iii) an open reading frame encoding an IDO polypeptide, e.g., a sequence optimized nucleic acid sequence encoding IDO set forth as SEQ ID NO: 5;
[0516] (iv) at least one stop codon (if not present at 5′ terminus of 3′UTR);
[0517] (v) a 3′ UTR, such as the sequences provided herein, for example, SEQ ID NO: 141; and
[0518] (vi) a poly-A tail provided herein (e.g., SEQ ID NO: 502).

[0519] In some embodiments, the polynucleotide comprising an mRNA nucleotide sequence encoding the IDO polypeptide and the membrane anchoring moiety comprises the nucleotide sequence of SEQ ID NO: 315, which consists of from 5′ to 3′ end: 5′ UTR of SEQ ID NO: 50, ORF sequence of SEQ ID NO: 5, and 3′ UTR of SEQ ID NO: 140.

[0520] In some embodiments, the polynucleotide encoding the IDO molecule comprises from 5′ to 3′ end
[0521] (i) a 5′ cap such as provided herein, e.g., m7GpppGmAG tetranucleotide cap;
[0522] (ii) a 5′ UTR, such as the sequences provided herein, for example, SEQ ID NO: 50;
[0523] (iii) an open reading frame encoding an IDO polypeptide, e.g., a sequence optimized nucleic acid sequence encoding IDO set forth as SEQ ID NO: 5;
[0524] (iv) at least one stop codon (if not present at 5′ terminus of 3′UTR);
[0525] (v) a 3′ UTR, such as the sequences provided herein, for example, SEQ ID NO: 140; and
[0526] (vi) a poly-A tail provided herein (e.g., SEQ ID NO: 209).

[0527] In some embodiments, the polynucleotide comprising an mRNA nucleotide sequence encoding the IDO polypeptide and the membrane anchoring moiety comprises the nucleotide sequence of SEQ ID NO: 316, which consists of from 5′ to 3′ end: 5′ UTR of SEQ ID NO: 55, ORF sequence of SEQ ID NO: 7, and 3′ UTR of SEQ ID NO: 107.

[0528] In some embodiments, the polynucleotide encoding the IDO molecule comprises from 5′ to 3′ end
[0529] (i) a 5′ cap such as provided herein, e.g., Cap C1;
[0530] (ii) a 5′ UTR, such as the sequences provided herein, for example, SEQ ID NO: 55;
[0531] (iii) an open reading frame encoding an IDO polypeptide, e.g., a sequence optimized nucleic acid sequence encoding IDO set forth as SEQ ID NO: 7;
[0532] (iv) at least one stop codon (if not present at 5′ terminus of 3′UTR);
[0533] (v) a 3′ UTR, such as the sequences provided herein, for example, SEQ ID NO: 107; and
[0534] (vi) a poly-A tail provided herein (e.g., SEQ ID NO: 502).

[0535] In some embodiments, the polynucleotide comprising an mRNA nucleotide sequence encoding the IDO polypeptide and the membrane anchoring moiety comprises the nucleotide sequence of SEQ ID NO: 317, which consists of from 5′ to 3′ end: 5′ UTR of SEQ ID NO: 56, ORF sequence of SEQ ID NO: 17, and 3′ UTR of SEQ ID NO: 108.

[0536] In some embodiments, the polynucleotide encoding the IDO molecule comprises from 5′ to 3′ end
[0537] (i) a 5′ cap such as provided herein, e.g., Cap C1;
[0538] (ii) a 5′ UTR, such as the sequences provided herein, for example, SEQ ID NO: 56;
[0539] (iii) an open reading frame encoding an IDO polypeptide, e.g., a sequence optimized nucleic acid sequence encoding IDO set forth as SEQ ID NO: 17;
[0540] (iv) at least one stop codon (if not present at 5′ terminus of 3′UTR);
[0541] (v) a 3′ UTR, such as the sequences provided herein, for example, SEQ ID NO: 108; and
[0542] (vi) a poly-A tail provided herein (e.g., SEQ ID NO: 502).

[0543] In some embodiments, the polynucleotide comprising an mRNA nucleotide sequence encoding the IDO polypeptide and the membrane anchoring moiety comprises the nucleotide sequence of SEQ ID NO: 318, which consists of from 5′ to 3′ end: 5′ UTR of SEQ ID NO: 56, ORF sequence of SEQ ID NO: 19, and 3′ UTR of SEQ ID NO: 108.

[0544] In some embodiments, the polynucleotide encoding the IDO molecule comprises from 5′ to 3′ end
[0545] (i) a 5′ cap such as provided herein, e.g., Cap C1;
[0546] (ii) a 5′ UTR, such as the sequences provided herein, for example, SEQ ID NO: 56;
[0547] (iii) an open reading frame encoding an IDO polypeptide, e.g., a sequence optimized nucleic acid sequence encoding IDO set forth as SEQ ID NO: 19;
[0548] (iv) at least one stop codon (if not present at 5′ terminus of 3′UTR);
[0549] (v) a 3′ UTR, such as the sequences provided herein, for example, SEQ ID NO: 108; and
[0550] (vi) a poly-A tail provided herein (e.g., SEQ ID NO: 502).

[0551] In an embodiment, the polynucleotide encoding the IDO1 molecule comprises the nucleotide sequence of any of Variant 1.1, Variant 1.2, Variant 1.3, Variant 1.4, Variant 1.5, Variant 1.6, Variant 1.7, Variant 1.8, Variant 1.9, Variant 1.10, Variant 1.11, Variant 2.1, Variant 2.2, Variant 2.3, Variant 2.4, Variant 2.5, Variant 3.1, Variant 4.1, or Variant 5.1, as described in Table 2A.

[0552] In an aspect, an LNP composition disclosed herein comprises a polynucleotide encoding an IDO molecule, e.g., IDO1, e.g., as described herein. In an embodiment, the IDO molecule comprises a fusion protein.

[0553] In an aspect, an LNP composition disclosed herein comprises a polynucleotide encoding an IDO molecule, e.g., IDO1, e.g., as described herein. In an embodiment, the IDO molecule comprises a half-life extender, e.g., a protein (or fragment thereof) that binds to a serum protein such as albumin, IgG, FcRn or transferrin. In an embodiment, the half-life extender is an immunoglobulin Fc region or a variant thereof, e.g., an IgG1 Fc.

[0554] In an embodiment, an LNP composition described herein comprises a polynucleotide encoding an IDO molecule, e.g. IDO1. In an embodiment, the IDO molecule further comprises a targeting moiety. In an embodiment, the targeting moiety comprises an antibody molecule (e.g., Fab or scFv), a receptor molecule (e.g., a receptor, a receptor fragment or functional variant thereof), a ligand molecule (e.g., a ligand, a ligand fragment or functional variant thereof), or a combination thereof.

[0555] In an embodiment, the IDO molecule is a chimeric molecule, e.g., comprising an IDO portion and a non-IDO portion, e.g., a membrane anchoring moiety. In an embodiment, the IDO molecule encoded by the polynucleotide is a chimeric molecule, e.g., the polynucleotide further comprises a nucleotide sequence encoding a non-IDO portion of the molecule, e.g., a membrane anchoring moiety.

[0556] In an aspect, the disclosure provides an LNP composition comprising a polynucleotide, e.g., encoding an IDO molecule, e.g., IDO1 or IDO2, e.g., as described herein.

[0557] In an embodiment, the IDO molecule comprises IDO2. In an embodiment the IDO molecule comprises a naturally occurring IDO2 molecule, a fragment (e.g., a functional fragment, e.g., a biologically active fragment) of a naturally occurring IDO2 molecule, or a variant thereof. In an embodiment, the IDO molecule comprises a variant of a naturally occurring IDO2 molecule (e.g., an IDO2 variant, e.g., as described herein), or a fragment thereof. In an embodiment, the LNP composition comprising a polynucleotide encoding an IDO2 molecule can be administered alone or in combination with an additional agent, e.g., an LNP composition comprising a polynucleotide encoding a different metabolic reprogramming molecule or an LNP composition comprising a polynucleotide encoding a different molecule.

[0558] In an aspect, an LNP composition disclosed herein comprises a polynucleotide encoding an IDO molecule, e.g., IDO2. In an embodiment, the IDO molecule comprises an IDO (e.g., IDO2) amino acid sequence described herein or an amino acid sequence having at least 85%, 90%, 95%, 96%, 97%, 98%, 99% identity to an IDO (e.g., IDO2) amino acid sequence described herein. In an embodiment, the IDO molecule comprises an amino acid sequence having at least 85%, 90%, 95%, 96%, 97%, 98%, 99% or 100% identity to an IDO amino acid sequence provided in Table 1A, e.g., SEQ ID NO: 8, or a functional fragment thereof. In an embodiment, the IDO molecule comprises the amino acid sequence of an IDO amino acid sequence provided in Table 1A, e.g., SEQ ID NO: 8, or a functional fragment thereof. In an embodiment, the IDO molecule comprises the amino acid sequence of SEQ ID NO: 8, or a functional fragment thereof. In an embodiment, the IDO molecule comprises an amino acid sequence having at least 85%, 90%, 95%, 96%, 97%, 98%, 99% or 100% identity to amino acids 2-420 of SEQ ID NO: 8, or a functional fragment thereof. In an embodiment, the IDO molecule comprises amino acids 2-420 of SEQ ID NO: 8, or a functional fragment thereof.

[0559] In an embodiment, the IDO molecule comprises an amino acid sequence for a leader sequence and/or an affinity tag (e.g., a leader sequence described herein and/or an affinity tag described herein). In an embodiment, the IDO molecule does not comprise an amino acid sequence for a leader sequence and/or an affinity tag (e.g., a leader sequence described herein and/or an affinity tag described herein).

[0560] In an embodiment, the polynucleotide encoding the IDO molecule and optionally, the membrane anchoring moiety comprises a nucleotide sequence (e.g., a codon-optimized nucleotide sequence) having at least 50%, 55%, 60%, 65%, 70%, 75%, 80%, 85%, 90%, 95%, 96%, 97%, 98%, 99% or 100% identity to the sequence of SEQ ID NO: 9 or 332, or at least 50%, 55%, 60%, 65%, 70%, 75%, 80%, 85%, 90%, 95%, 96%, 97%, 98%, 99% or 100% identity to nucleotides 4-1260 of SEQ ID NO: 9, or a functional fragment thereof. In an embodiment, the polynucleotide (e.g., mRNA) encoding the IDO molecule and optionally, the membrane anchoring moiety comprises the nucleotide sequence of SEQ ID NO: 9 or 332, or a functional fragment thereof, or at least 50%, 55%, 60%, 65%, 70%, 75%, 80%, 85%, 90%, 95%, 96%, 97%, 98%, 99% or 100% identity to nucleotides 4-1260 of SEQ ID NO: 9, or a functional fragment thereof.

[0561] In an embodiment, the polynucleotide (e.g., mRNA) encoding the IDO molecule and optionally, the membrane anchoring moiety comprises a nucleotide sequence that encodes for a leader sequence and/or an affinity tag (e.g., a leader sequence described herein and/or an affinity tag described herein). In an embodiment, the polynucleotide (e.g., mRNA) encoding the IDO molecule and optionally, the membrane anchoring moiety does not comprise a nucleotide sequence that encodes for a leader sequence and/or an affinity tag (e.g., a leader sequence described herein and/or an affinity tag described herein).

[0562] In an embodiment, the polynucleotide (e.g., mRNA) encoding the IDO molecule further comprises one or more elements, e.g., a 5′ UTR and/or a 3′ UTR (e.g., a 5′ UTR described herein and/or a 3′ UTR described herein). In an embodiment, the 5′ UTR and/or 3′UTR comprise one or more micro RNA (mIR) binding sites, e.g., as disclosed herein. Exemplary 5′ UTRs and 3′ UTRs are disclosed in the section entitled “5′ UTR and 3′UTR” herein.

[0563] In some embodiments, the polynucleotide comprising an mRNA nucleotide sequence encoding the IDO polypeptide and the membrane anchoring moiety comprises the nucleotide sequence of SEQ ID NO: 332, which consists of from 5′ to 3′ end: 5′ UTR of SEQ ID NO: 55, ORF sequence of SEQ ID NO: 9, and 3′ UTR of SEQ ID NO: 107.

[0564] In some embodiments, the polynucleotide encoding the IDO molecule comprises from 5′ to 3′ end
[0565] (i) a 5′ cap such as provided herein, e.g., Cap C1;
[0566] (ii) a 5′ UTR, such as the sequences provided herein, for example, SEQ ID NO: 55;
[0567] (iii) an open reading frame encoding an IDO polypeptide, e.g., a sequence optimized nucleic acid sequence encoding IDO set forth as SEQ ID NO: 9;
[0568] (iv) at least one stop codon (if not present at 5′ terminus of 3′UTR);
[0569] (v) a 3′ UTR, such as the sequences provided herein, for example, SEQ ID NO: 107; and
[0570] (vi) a poly-A tail provided herein (e.g., SEQ ID NO: 502).

[0571] In an aspect, an LNP composition disclosed herein comprises a polynucleotide encoding an IDO molecule, e.g., IDO2, e.g., as described herein. In an embodiment, the IDO molecule comprises a fusion protein.

[0572] In an aspect, an LNP composition disclosed herein comprises a polynucleotide encoding an IDO molecule, e.g., IDO2, e.g., as described herein. In an embodiment, the IDO molecule comprises a half-life extender, e.g., a protein (or fragment thereof) that binds to a serum protein such as albumin, IgG, FcRn or transferrin. In an embodiment, the half-life extender is an immunoglobulin Fc region or a variant thereof, e.g., an IgG1 Fc.

[0573] In an embodiment, an LNP composition described herein comprises a polynucleotide encoding an IDO molecule, e.g. IDO2. In an embodiment, the IDO molecule further comprises a targeting moiety. In an embodiment, the targeting moiety comprises an antibody molecule (e.g., Fab or scFv), a receptor molecule (e.g., a receptor, a receptor fragment or functional variant thereof), a ligand molecule (e.g., a ligand, a ligand fragment or functional variant thereof), or a combination thereof.

[0574] In an embodiment, the IDO molecule is a chimeric molecule, e.g., comprising an IDO portion and a non-IDO portion. In an embodiment, the IDO molecule encoded by the polynucleotide is a chimeric molecule, e.g., the polynucleotide further comprises a nucleotide sequence encoding a non-IDO portion of the molecule, e.g., a membrane anchoring moiety.

### TDO Molecule

[0575] Tryptophan 2,3-dioxygenase (TDO) is an enzyme with Tryptophan catabolizing activity and is also known as TDO2. TDO is a cytosolic enzyme with a heme prosthetic group which catalyzes the rate-limiting step of Tryptophan catabolism (van Baren et al. (2015) Frontiers in Immunology 6:34; doi: 10.3389/fimmu.2015.00034). TDO (or TDO2) is mainly expressed in the liver, where it regulates the level of blood tryptophan and is responsible, e.g., for the metabolism of dietary tryptophan. TDO can be positively regulated by tryptophan which can increase, e.g., TDO expression and/or activity.

[0576] In an aspect, the disclosure provides an LNP composition comprising a polynucleotide, e.g., encoding a TDO molecule, e.g., as described herein.

[0577] In an embodiment the TDO molecule comprises a naturally occurring TDO molecule, a fragment (e.g., a functional fragment, e.g., a biologically active fragment) of a naturally occurring TDO molecule, or a variant thereof. In an embodiment, the TDO molecule comprises a variant of a naturally occurring TDO molecule (e.g., a TDO variant, e.g., as described herein), or a fragment thereof. In an embodiment, the LNP composition comprising a polynucleotide encoding a TDO molecule can be administered alone or in combination with an additional agent, e.g., an LNP composition comprising a polynucleotide encoding a different metabolic reprogramming molecule or an LNP composition comprising a polynucleotide encoding a different molecule.

[0578] In an aspect, an LNP composition disclosed herein comprises a polynucleotide encoding a TDO molecule. In an embodiment, the TDO molecule comprises a TDO amino acid sequence described herein or an amino acid sequence having at least 85%, 90%, 95%, 96%, 97%, 98%, 99% identity to a TDO amino acid sequence described herein. In an embodiment, the TDO molecule comprises an amino acid sequence having at least 85%, 90%, 95%, 96%, 97%, 98%, 99% or 100% identity to a TDO amino acid sequence provided in Table 1A, e.g., SEQ ID NO: 10, 12, 20, or 22, or a functional fragment thereof. In an embodiment, the TDO molecule comprises the amino acid sequence of a TDO amino acid sequence provided in Table 1A, e.g., SEQ ID NO: 10, 12, 20, or 22, or a functional fragment thereof. In an embodiment, the TDO molecule comprises the amino acid sequence of SEQ ID NO: 10, 12, 20, or 22, or a functional fragment thereof. In an embodiment, the TDO molecule comprises an amino acid sequence having at least 85%, 90%, 95%, 96%, 97%, 98%, 99% or 100% identity to amino acids 2-406 of SEQ ID NO: 10, amino acids 2-440 of SEQ ID NO: 12; amino acids 2-438 of SEQ ID NO: 20; or amino acids 2-426 of SEQ ID NO: 22, or a functional fragment thereof. In an embodiment, the TDO molecule comprises amino acids 2-406 of SEQ ID NO:10, amino acids 2-440 of SEQ ID NO: 12; amino acids 2-438 of SEQ ID NO: 20; or amino acids 2-426 of SEQ ID NO: 22, or a functional fragment thereof.

[0579] In an embodiment, the TDO molecule comprises an amino acid sequence for a leader sequence and/or an affinity tag (e.g., a leader sequence described herein and/or an affinity tag described herein). In an embodiment, the TDO molecule does not comprise an amino acid sequence for a leader sequence and/or an affinity tag (e.g., a leader sequence described herein and/or an affinity tag described herein).

[0580] In an embodiment, the polynucleotide encoding the TDO molecule and optionally, the membrane anchoring moiety comprises a nucleotide sequence (e.g., a codon-optimized nucleotide sequence) having at least 50%, 55%, 60%, 65%, 70%, 75%, 80%, 85%, 90%, 95%, 96%, 97%, 98%, 99% or 100% identity to the sequence of any one of SEQ ID NOs: 11, 13-15, 21, 23, or 319-331, or a functional fragment thereof, or at least 50%, 55%, 60%, 65%, 70%, 75%, 80%, 85%, 90%, 95%, 96%, 97%, 98%, 99% or 100% identity to nucleotides 4-1218 of SEQ ID NO: 11; nucleotides 4-1320 of SEQ ID NO: 13; nucleotides 4-1320 of SEQ ID NO: 14; nucleotides 4-1320 of SEQ ID NO: 15; nucleotides 4-1314 of SEQ ID NO: 21; or nucleotides 4-1278 of SEQ ID NO: 23. In an embodiment, the polynucleotide (e.g., mRNA) encoding the TDO molecule and optionally, the membrane anchoring moiety comprises the nucleotide sequence of any one of SEQ ID NOs: 11, 13-15, 21, 23, or 319-331, or a functional fragment thereof, or at least 50%, 55%, 60%, 65%, 70%, 75%, 80%, 85%, 90%, 95%, 96%, 97%, 98%, 99% or 100% identity to nucleotides 4-1218 of SEQ ID NO: 11; nucleotides 4-1320 of SEQ ID NO: 13; nucleotides 4-1320 of SEQ ID NO: 14; nucleotides 4-1320 of SEQ ID NO: 15; nucleotides 4-1314 of SEQ ID NO: 21; or nucleotides 4-1278 of SEQ ID NO: 23, or a functional fragment thereof.

[0581] In an embodiment, the polynucleotide (e.g., mRNA) encoding the TDO molecule and optionally, the membrane anchoring moiety comprises a nucleotide sequence that encodes for a leader sequence and/or an affinity tag (e.g., a leader sequence described herein and/or an affinity tag described herein). In an embodiment, the polynucleotide (e.g., mRNA) encoding the TDO molecule and optionally, the membrane anchoring moiety does not comprise a nucleotide sequence that encodes for a leader sequence and/or an affinity tag (e.g., a leader sequence described herein and/or an affinity tag described herein).

[0582] In an embodiment, the polynucleotide (e.g., mRNA) encoding the TDO molecule further comprises one or more elements, e.g., a 5′ UTR and/or a 3′ UTR (e.g., a 5′ UTR described herein and/or a 3′ UTR described herein). In an embodiment, the 5′ UTR and/or 3′UTR comprise one or more micro RNA (mIR) binding sites, e.g., as disclosed herein. Exemplary 5′ UTRs and 3′ UTRs are disclosed in the section entitled “5′ UTR and 3′UTR” herein.

[0583] In some embodiments, the polynucleotide comprising an mRNA nucleotide sequence encoding the TDO polypeptide and the membrane anchoring moiety comprises the nucleotide sequence of SEQ ID NO: 319, which consists of from 5′ to 3′ end: 5′ UTR of SEQ ID NO: 55, ORF sequence of SEQ ID NO: 11, and 3′ UTR of SEQ ID NO: 107.

[0584] In some embodiments, the polynucleotide encoding the TDO molecule comprises from 5′ to 3′ end
[0585] (i) a 5′ cap such as provided herein, e.g., Cap C1;
[0586] (ii) a 5′ UTR, such as the sequences provided herein, for example, SEQ ID NO: 55;
[0587] (iii) an open reading frame encoding a TDO polypeptide, e.g., a sequence optimized nucleic acid sequence encoding TDO set forth as SEQ ID NO: 11;
[0588] (iv) at least one stop codon (if not present at 5′ terminus of 3′UTR);
[0589] (v) a 3′ UTR, such as the sequences provided herein, for example, SEQ ID NO: 107; and
[0590] (vi) a poly-A tail provided herein (e.g., SEQ ID NO: 502).

[0591] In some embodiments, the polynucleotide comprising an mRNA nucleotide sequence encoding the TDO polypeptide and the membrane anchoring moiety comprises the nucleotide sequence of SEQ ID NO: 320, which consists of from 5′ to 3′ end: 5′ UTR of SEQ ID NO: 55, ORF sequence of SEQ ID NO: 13, and 3′ UTR of SEQ ID NO: 107.

[0592] In some embodiments, the polynucleotide encoding the TDO molecule comprises from 5′ to 3′ end
[0593] (i) a 5′ cap such as provided herein, e.g., Cap C1;
[0594] (ii) a 5′ UTR, such as the sequences provided herein, for example, SEQ ID NO: 55;
[0595] (iii) an open reading frame encoding a TDO polypeptide, e.g., a sequence optimized nucleic acid sequence encoding TDO set forth as SEQ ID NO: 13;
[0596] (iv) at least one stop codon (if not present at 5′ terminus of 3′UTR);
[0597] (v) a 3′ UTR, such as the sequences provided herein, for example, SEQ ID NO: 107; and
[0598] (vi) a poly-A tail provided herein (e.g., SEQ ID NO: 502).

[0599] In some embodiments, the polynucleotide comprising an mRNA nucleotide sequence encoding the TDO polypeptide and the membrane anchoring moiety comprises the nucleotide sequence of SEQ ID NO: 321, which consists of from 5′ to 3′ end: 5′ UTR of SEQ ID NO: 50, ORF sequence of SEQ ID NO: 13, and 3′ UTR of SEQ ID NO: 108.

[0600] In some embodiments, the polynucleotide encoding the TDO molecule comprises from 5′ to 3′ end
[0601] (i) a 5′ cap such as provided herein, e.g., Cap C1;
[0602] (ii) a 5′ UTR, such as the sequences provided herein, for example, SEQ ID NO: 50;
[0603] (iii) an open reading frame encoding a TDO polypeptide, e.g., a sequence optimized nucleic acid sequence encoding TDO set forth as SEQ ID NO: 13;
[0604] (iv) at least one stop codon (if not present at 5′ terminus of 3′UTR);
[0605] (v) a 3′ UTR, such as the sequences provided herein, for example, SEQ ID NO: 108; and
[0606] (vi) a poly-A tail provided herein (e.g., SEQ ID NO: 502).

[0607] In some embodiments, the polynucleotide comprising an mRNA nucleotide sequence encoding the TDO polypeptide and the membrane anchoring moiety comprises the nucleotide sequence of SEQ ID NO: 322, which consists of from 5′ to 3′ end: 5′ UTR of SEQ ID NO: 50, ORF sequence of SEQ ID NO: 13, and 3′ UTR of SEQ ID NO: 140.

[0608] In some embodiments, the polynucleotide encoding the TDO molecule comprises from 5′ to 3′ end
[0609] (i) a 5′ cap such as provided herein, e.g., Cap C1;
[0610] (ii) a 5′ UTR, such as the sequences provided herein, for example, SEQ ID NO: 50;
[0611] (iii) an open reading frame encoding a TDO polypeptide, e.g., a sequence optimized nucleic acid sequence encoding TDO set forth as SEQ ID NO: 13;
[0612] (iv) at least one stop codon (if not present at 5′ terminus of 3′UTR);
[0613] (v) a 3′ UTR, such as the sequences provided herein, for example, SEQ ID NO: 140; and
[0614] (vi) a poly-A tail provided herein (e.g., SEQ ID NO: 502).

[0615] In some embodiments, the polynucleotide comprising an mRNA nucleotide sequence encoding the TDO polypeptide and the membrane anchoring moiety comprises the nucleotide sequence of SEQ ID NO: 323, which consists of from 5′ to 3′ end: 5′ UTR of SEQ ID NO: 50, ORF sequence of SEQ ID NO: 14, and 3′ UTR of SEQ ID NO: 108.

[0616] In some embodiments, the polynucleotide encoding the TDO molecule comprises from 5′ to 3′ end
[0617] (i) a 5′ cap such as provided herein, e.g., Cap C1;
[0618] (ii) a 5′ UTR, such as the sequences provided herein, for example, SEQ ID NO: 50;
[0619] (iii) an open reading frame encoding a TDO polypeptide, e.g., a sequence optimized nucleic acid sequence encoding TDO set forth as SEQ ID NO: 14;
[0620] (iv) at least one stop codon (if not present at 5′ terminus of 3′UTR);
[0621] (v) a 3′ UTR, such as the sequences provided herein, for example, SEQ ID NO: 108; and
[0622] (vi) a poly-A tail provided herein (e.g., SEQ ID NO: 502).

[0623] In some embodiments, the polynucleotide comprising an mRNA nucleotide sequence encoding the TDO polypeptide and the membrane anchoring moiety comprises the nucleotide sequence of SEQ ID NO: 324, which consists of from 5′ to 3′ end: 5′ UTR of SEQ ID NO: 50, ORF sequence of SEQ ID NO: 14, and 3′ UTR of SEQ ID NO: 140.

[0624] In some embodiments, the polynucleotide encoding the TDO molecule comprises from 5′ to 3′ end
[0625] (i) a 5′ cap such as provided herein, e.g., Cap C1;
[0626] (ii) a 5′ UTR, such as the sequences provided herein, for example, SEQ ID NO: 50;
[0627] (iii) an open reading frame encoding a TDO polypeptide, e.g., a sequence optimized nucleic acid sequence encoding TDO set forth as SEQ ID NO: 14;
[0628] (iv) at least one stop codon (if not present at 5′ terminus of 3′UTR);
[0629] (v) a 3′ UTR, such as the sequences provided herein, for example, SEQ ID NO: 140; and
[0630] (vi) a poly-A tail provided herein (e.g., SEQ ID NO: 502).

[0631] In some embodiments, the polynucleotide comprising an mRNA nucleotide sequence encoding the TDO polypeptide and the membrane anchoring moiety comprises the nucleotide sequence of SEQ ID NO: 325, which consists of from 5′ to 3′ end: 5′ UTR of SEQ ID NO: 50, ORF sequence of SEQ ID NO: 14, and 3′ UTR of SEQ ID NO: 141.

[0632] In some embodiments, the polynucleotide encoding the TDO molecule comprises from 5′ to 3′ end
[0633] (i) a 5′ cap such as provided herein, e.g., Cap C1;
[0634] (ii) a 5′ UTR, such as the sequences provided herein, for example, SEQ ID NO: 50;
[0635] (iii) an open reading frame encoding a TDO polypeptide, e.g., a sequence optimized nucleic acid sequence encoding TDO set forth as SEQ ID NO: 14;
[0636] (iv) at least one stop codon (if not present at 5′ terminus of 3′UTR);
[0637] (v) a 3′ UTR, such as the sequences provided herein, for example, SEQ ID NO: 141; and
[0638] (vi) a poly-A tail provided herein (e.g., SEQ ID NO: 502).

[0639] In some embodiments, the polynucleotide comprising an mRNA nucleotide sequence encoding the TDO polypeptide and the membrane anchoring moiety comprises the nucleotide sequence of SEQ ID NO: 326, which consists of from 5′ to 3′ end: 5′ UTR of SEQ ID NO: 50, ORF sequence of SEQ ID NO: 14, and 3′ UTR of SEQ ID NO: 100.

[0640] In some embodiments, the polynucleotide encoding the TDO molecule comprises from 5′ to 3′ end
[0641] (i) a 5′ cap such as provided herein, e.g., Cap C1;
[0642] (ii) a 5′ UTR, such as the sequences provided herein, for example, SEQ ID NO: 50;
[0643] (iii) an open reading frame encoding a TDO polypeptide, e.g., a sequence optimized nucleic acid sequence encoding TDO set forth as SEQ ID NO: 14;
[0644] (iv) at least one stop codon (if not present at 5′ terminus of 3′UTR);
[0645] (v) a 3′ UTR, such as the sequences provided herein, for example, SEQ ID NO: 100; and
[0646] (vi) a poly-A tail provided herein (e.g., SEQ ID NO: 502).

[0647] In some embodiments, the polynucleotide comprising an mRNA nucleotide sequence encoding the TDO polypeptide and the membrane anchoring moiety comprises the nucleotide sequence of SEQ ID NO: 327, which consists of from 5′ to 3′ end: 5′ UTR of SEQ ID NO: 50, ORF sequence of SEQ ID NO: 15, and 3′ UTR of SEQ ID NO: 108.

[0648] In some embodiments, the polynucleotide encoding the TDO molecule comprises from 5′ to 3′ end
[0649] (i) a 5′ cap such as provided herein, e.g., Cap C1;
[0650] (ii) a 5′ UTR, such as the sequences provided herein, for example, SEQ ID NO: 50;
[0651] (iii) an open reading frame encoding a TDO polypeptide, e.g., a sequence optimized nucleic acid sequence encoding TDO set forth as SEQ ID NO: 15;
[0652] (iv) at least one stop codon (if not present at 5′ terminus of 3′UTR);
[0653] (v) a 3′ UTR, such as the sequences provided herein, for example, SEQ ID NO: 108; and
[0654] (vi) a poly-A tail provided herein (e.g., SEQ ID NO: 502).

[0655] In some embodiments, the polynucleotide comprising an mRNA nucleotide sequence encoding the TDO polypeptide and the membrane anchoring moiety comprises the nucleotide sequence of SEQ ID NO: 328, which consists of from 5′ to 3′ end: 5′ UTR of SEQ ID NO: 55, ORF sequence of SEQ ID NO: 13, and 3′ UTR of SEQ ID NO: 107.

[0656] In some embodiments, the polynucleotide encoding the TDO molecule comprises from 5′ to 3′ end
[0657] (i) a 5′ cap such as provided herein, e.g., Cap C1;
[0658] (ii) a 5′ UTR, such as the sequences provided herein, for example, SEQ ID NO: 55;
[0659] (iii) an open reading frame encoding a TDO polypeptide, e.g., a sequence optimized nucleic acid sequence encoding TDO set forth as SEQ ID NO: 13;
[0660] (iv) at least one stop codon (if not present at 5′ terminus of 3′UTR);
[0661] (v) a 3′ UTR, such as the sequences provided herein, for example, SEQ ID NO: 107; and
[0662] (vi) a poly-A tail provided herein (e.g., SEQ ID NO: 209).

[0663] In some embodiments, the polynucleotide comprising an mRNA nucleotide sequence encoding the TDO polypeptide and the membrane anchoring moiety comprises the nucleotide sequence of SEQ ID NO: 329, which consists of from 5′ to 3′ end: 5′ UTR of SEQ ID NO: 50, ORF sequence of SEQ ID NO: 14, and 3′ UTR of SEQ ID NO: 140.

[0664] In some embodiments, the polynucleotide encoding the TDO molecule comprises from 5′ to 3′ end
[0665] (i) a 5′ cap such as provided herein, e.g., Cap C1;
[0666] (ii) a 5′ UTR, such as the sequences provided herein, for example, SEQ ID NO: 50;
[0667] (iii) an open reading frame encoding a TDO polypeptide, e.g., a sequence optimized nucleic acid sequence encoding TDO set forth as SEQ ID NO: 14;
[0668] (iv) at least one stop codon (if not present at 5′ terminus of 3′UTR);
[0669] (v) a 3′ UTR, such as the sequences provided herein, for example, SEQ ID NO: 140; and
[0670] (vi) a poly-A tail provided herein (e.g., SEQ ID NO: 209).

[0671] In some embodiments, the polynucleotide comprising an mRNA nucleotide sequence encoding the TDO polypeptide and the membrane anchoring moiety comprises the nucleotide sequence of SEQ ID NO: 330, which consists of from 5′ to 3′ end: 5′ UTR of SEQ ID NO: 56, ORF sequence of SEQ ID NO: 21, and 3′ UTR of SEQ ID NO: 108.

[0672] In some embodiments, the polynucleotide encoding the TDO molecule comprises from 5′ to 3′ end
[0673] (i) a 5′ cap such as provided herein, e.g., Cap C1;
[0674] (ii) a 5′ UTR, such as the sequences provided herein, for example, SEQ ID NO: 56;
[0675] (iii) an open reading frame encoding a TDO polypeptide, e.g., a sequence optimized nucleic acid sequence encoding TDO set forth as SEQ ID NO: 21;
[0676] (iv) at least one stop codon (if not present at 5′ terminus of 3′UTR);
[0677] (v) a 3′ UTR, such as the sequences provided herein, for example, SEQ ID NO: 108; and
[0678] (vi) a poly-A tail provided herein (e.g., SEQ ID NO: 502).

[0679] In some embodiments, the polynucleotide comprising an mRNA nucleotide sequence encoding the TDO polypeptide and the membrane anchoring moiety comprises the nucleotide sequence of SEQ ID NO: 331, which consists of from 5′ to 3′ end: 5′ UTR of SEQ ID NO: 56, ORF sequence of SEQ ID NO: 23, and 3′ UTR of SEQ ID NO: 108.

[0680] In some embodiments, the polynucleotide encoding the TDO molecule comprises from 5′ to 3′ end
[0681] (i) a 5′ cap such as provided herein, e.g., Cap C1;
[0682] (ii) a 5′ UTR, such as the sequences provided herein, for example, SEQ ID NO: 56;
[0683] (iii) an open reading frame encoding a TDO polypeptide, e.g., a sequence optimized nucleic acid sequence encoding TDO set forth as SEQ ID NO: 23;
[0684] (iv) at least one stop codon (if not present at 5′ terminus of 3′UTR);
[0685] (v) a 3′ UTR, such as the sequences provided herein, for example, SEQ ID NO: 108; and
[0686] (vi) a poly-A tail provided herein (e.g., SEQ ID NO: 502).

[0687] In an embodiment, the polynucleotide encoding the TDO2 molecule comprises the nucleotide sequence of any of Variant 1.1, Variant 2.1, Variant 2.2, Variant 2.3, Variant 2.4, Variant 2.5, Variant 2.6, Variant 2.7, Variant 2.8, Variant 2.9, Variant 2.10, Variant 3.1, or Variant 4.1, as described in Table 2A.

[0688] In an aspect, an LNP composition disclosed herein comprises a polynucleotide encoding a TDO molecule, e.g., as described herein. In an embodiment, the TDO molecule comprises a fusion protein.

[0689] In an aspect, an LNP composition disclosed herein comprises a polynucleotide encoding a TDO molecule, e.g., as described herein. In an embodiment, the TDO molecule comprises a half-life extender, e.g., a protein (or fragment thereof) that binds to a serum protein such as albumin, IgG, FcRn or transferrin. In an embodiment, the half-life extender is an immunoglobulin Fc region or a variant thereof, e.g., an IgG1 Fc.

[0690] In an embodiment, an LNP composition described herein comprises a polynucleotide encoding a TDO molecule. In an embodiment, the TDO molecule further comprises a targeting moiety. In an embodiment, the targeting moiety comprises an antibody molecule (e.g., Fab or scFv), a receptor molecule (e.g., a receptor, a receptor fragment or functional variant thereof), a ligand molecule (e.g., a ligand, a ligand fragment or functional variant thereof), or a combination thereof.

[0691] In an embodiment, the TDO molecule is a chimeric molecule, e.g., comprising a TDO portion and a non-TDO portion. In an embodiment, the TDO molecule encoded by the polynucleotide is a chimeric molecule, e.g., the polynucleotide further comprises a nucleotide sequence encoding a non-TDO portion of the molecule, e.g., a membrane anchoring moiety.

### AMPK Molecule

[0692] 5′ adenosine monophosphate-activated protein kinase (AMPK), also known as ACC kinase 3 or HMGR kinase, is an enzyme which plays a role, e.g., in cellular energy homeostasis. AMPK is an alpha-beta-gamma heterotrimer comprising an alpha catalytic subunit and beta and gamma regulatory subunit (Steinberg G R and Kemp B R (2009), Physiol. Rev. 89: 1025-1078). The AMPK alpha subunits are encoded by 2 genes, PRKA1 and PRKA2. The AMPK beta subunits are encoded by 2 genes, PRKAB1 and PRKAB2. The AMPK gamma subunits are encoded by 3 genes, PRKAG1, PRKAG2 and PRKAG3. In some embodiments, an AMPK molecule can comprise one alpha subunit, one beta subunit and one gamma subunit, or any combination thereof. In some embodiments, an AMPK molecule comprises an AMPK gamma subunit, e.g., a polypeptide encoded by a PRKAG1, a PRKAG2 or a PRKAG3 nucleotide sequence. In some embodiments, an AMPK molecule comprises an AMPK gamma subunit of PRKAG3. In some embodiments, an AMPK molecule comprises an AMPK gamma subunit of PRKAG2. In some embodiments, an AMPK molecule comprises an AMPK gamma subunit of PRKAG1.

[0693] In an aspect, the disclosure provides an LNP composition comprising a polynucleotide, e.g., encoding an AMPK molecule, e.g., as described herein.

[0694] In an embodiment the AMPK molecule comprises a naturally occurring AMPK molecule, a fragment (e.g., a functional fragment, e.g., a biologically active fragment) of a naturally occurring AMPK molecule, or a variant thereof. In an embodiment, the AMPK molecule comprises a variant of a naturally occurring AMPK molecule (e.g., an AMPK variant, e.g., as described herein), or a fragment thereof. In an embodiment, the LNP composition comprising a polynucleotide encoding an AMPK molecule can be administered alone or in combination with an additional agent, e.g., an LNP composition comprising a polynucleotide encoding a different metabolic reprogramming molecule or an LNP composition comprising a polynucleotide encoding a different molecule.

[0695] In an aspect, an LNP composition disclosed herein comprises a polynucleotide encoding an AMPK molecule. In an embodiment, the AMPK molecule comprises an AMPK amino acid sequence described herein or an amino acid sequence having at least 85%, 90%, 95%, 96%, 97%, 98%, 99% identity to an AMPK amino acid sequence described herein. In an embodiment, the AMPK molecule comprises an amino acid sequence having at least 85%, 90%, 95%, 96%, 97%, 98%, 99% or 100% identity to an AMPK amino acid sequence provided in Table 1A, e.g., SEQ ID NO: 25, or a functional fragment thereof. In an embodiment, the AMPK molecule comprises the amino acid sequence of an AMPK amino acid sequence provided in Table 1A, e.g., SEQ ID NO: 25, or a functional fragment thereof. In an embodiment, the AMPK molecule comprises the amino acid sequence of SEQ ID NO: 25, or a functional fragment thereof. In an embodiment, the AMPK molecule comprises an amino acid sequence having at least 85%, 90%, 95%, 96%, 97%, 98%, 99% or 100% identity to amino acids 2-569 of SEQ ID NO: 25, or a functional fragment thereof. In an embodiment, the AMPK molecule comprises amino acids 2-569 of SEQ ID NO: 25, or a functional fragment thereof.

[0696] In an embodiment, the AMPK molecule comprises an amino acid sequence for a leader sequence and/or an affinity tag (e.g., a leader sequence described herein and/or an affinity tag described herein). In an embodiment, the AMPK molecule does not comprise an amino acid sequence for a leader sequence and/or an affinity tag (e.g., a leader sequence described herein and/or an affinity tag described herein).

[0697] In an embodiment, the polynucleotide encoding the AMPK molecule and optionally, the membrane anchoring moiety comprises a nucleotide sequence (e.g., a codon-optimized nucleotide sequence) having at least 50%, 55%, 60%, 65%, 70%, 75%, 80%, 85%, 90%, 95%, 96%, 97%, 98%, 99% or 100% identity to the sequence of SEQ ID NO: 26, or a functional fragment thereof, or at least 50%, 55%, 60%, 65%, 70%, 75%, 80%, 85%, 90%, 95%, 96%, 97%, 98%, 99% or 100% identity to nucleotides 4-1707 of SEQ ID NO: 26, or a functional fragment thereof. In an embodiment, the polynucleotide (e.g., mRNA) encoding the AMPK molecule and optionally, the membrane anchoring moiety comprises the nucleotide sequence of SEQ ID NO: 26, or a functional fragment thereof, or at least 50%, 55%, 60%, 65%, 70%, 75%, 80%, 85%, 90%, 95%, 96%, 97%, 98%, 99% or 100% identity to nucleotides 4-1707 of SEQ ID NO: 26, or a functional fragment thereof.

[0698] In an embodiment, the polynucleotide (e.g., mRNA) encoding the AMPK molecule and optionally, the membrane anchoring moiety comprises a nucleotide sequence that encodes for a leader sequence and/or an affinity tag (e.g., a leader sequence described herein and/or an affinity tag described herein). In an embodiment, the polynucleotide (e.g., mRNA) encoding the AMPK molecule and optionally, the membrane anchoring moiety does not comprise a nucleotide sequence that encodes for a leader sequence and/or an affinity tag (e.g., a leader sequence described herein and/or an affinity tag described herein).

[0699] In an embodiment, the polynucleotide (e.g., mRNA) encoding the AMPK molecule further comprises one or more elements, e.g., a 5′ UTR and/or a 3′ UTR (e.g., a 5′ UTR described herein and/or a 3′ UTR described herein). In an embodiment, the 5′ UTR and/or 3′UTR comprise one or more micro RNA (mIR) binding sites, e.g., as disclosed herein.

[0700] Exemplary 5′ UTRs and 3′ UTRs are disclosed in the section entitled “5′ UTR and 3′UTR” herein.

[0701] In an aspect, an LNP composition disclosed herein comprises a polynucleotide encoding an AMPK molecule, e.g., as described herein. In an embodiment, the AMPK molecule comprises a fusion protein.

[0702] In an aspect, an LNP composition disclosed herein comprises a polynucleotide encoding an AMPK molecule, e.g., as described herein. In an embodiment, the AMPK molecule comprises a half-life extender, e.g., a protein (or fragment thereof) that binds to a serum protein such as albumin, IgG, FcRn or transferrin. In an embodiment, the half-life extender is an immunoglobulin Fc region or a variant thereof, e.g., an IgG1 Fc.

[0703] In an embodiment, an LNP composition described herein comprises a polynucleotide encoding an AMPK molecule. In an embodiment, the AMPK molecule further comprises a targeting moiety. In an embodiment, the targeting moiety comprises an antibody molecule (e.g., Fab or scFv), a receptor molecule (e.g., a receptor, a receptor fragment or functional variant thereof), a ligand molecule (e.g., a ligand, a ligand fragment or functional variant thereof), or a combination thereof.

[0704] In an embodiment, the AMPK molecule is a chimeric molecule, e.g., comprising an AMPK portion and a non-AMPK portion, e.g., a membrane anchoring moiety. In an embodiment, the AMPK molecule encoded by the polynucleotide is a chimeric molecule, e.g., the polynucleotide further comprises a nucleotide sequence encoding a non-AMPK portion of the molecule, e.g., a membrane anchoring moiety.

### AhR Molecule

[0705] Aryl hydrocarbon receptor (AhR) is a basic helix-loop-helix periodicity/ARNT/isngle-minded (PAS) transcription factor (Ito et al (2004) Journal of Biological Chemistry 279:24 25204-210). When not bound by a ligand, the AhR is located in the cytoplasm in association with other proteins. Once bound by a ligand, e.g., 2,3,7,8-Tetrachlorodibenzo-p-dioxin (TCDD), AhR translocates into the nucleus where it forms a heterodimer with an AhR nuclear translocator (ARNT) and binds to specific DNA motifs to induce gene transcription (see Ito et al. (2004)). AhR can be engineered to be activated, e.g., constitutively activated, in the absence of a ligand by deletion of, e.g., the minimal PAS B motif. In some embodiments, a constitutively active Ah R (CA-AhR) translocates into the nucleus in the absence of a ligand and forms a heterodimer with ARNT to induce gene transcription.

[0706] In an aspect, the disclosure provides an LNP composition comprising a polynucleotide, e.g., encoding an AhR molecule (e.g., CA-AhR), e.g., as described herein.

[0707] In an embodiment the AhR molecule (e.g., CA-AhR) comprises a fragment (e.g., a functional fragment, e.g., a biologically active fragment) of a naturally occurring AhR molecule.

[0708] In an embodiment, the AhR molecule comprises a deletion of a naturally occurring AhR molecule, e.g., a deletion of a periodicity-ARNT-single-minded (PAS) B motif, e.g., as disclosed in Ito et al (2004) Journal of Biological Chemistry 279:24 25204-210. In an embodiment, the LNP composition comprising a polynucleotide encoding an AhR molecule (e.g., CA-AhR), can be administered alone or in combination with an additional agent, e.g., an LNP composition comprising a polynucleotide encoding a different metabolic reprogramming molecule or an LNP composition comprising a polynucleotide encoding a different molecule.

[0709] In an aspect, an LNP composition disclosed herein comprises a polynucleotide encoding an AhR molecule (e.g., CA-Ahr). In an embodiment, the AhR molecule (e.g., CA-Ahr) comprises an AhR molecule (e.g., CA-Ahr) amino acid sequence described herein or an amino acid sequence having at least 85%, 90%, 95%, 96%, 97%, 98%, 99% identity to an AhR (e.g., CA-AhR) amino acid sequence described herein. In an embodiment, the AhR molecule (e.g., CA-Ahr) comprises an amino acid sequence having at least 85%, 90%, 95%, 96%, 97%, 98%, 99% or 100% identity to a CA-Ahr amino acid sequence provided in Table 1A, e.g., SEQ ID NO: 31, or a functional fragment thereof. In an embodiment, the AhR molecule (e.g., CA-Ahr) comprises the amino acid sequence of CA-Ahr provided in Table 1A, e.g., SEQ ID NO: 31, or a functional fragment thereof. In an embodiment, the AhR molecule (e.g., CA-Ahr) comprises the amino acid sequence of SEQ ID NO: 31, or a functional fragment thereof. In an embodiment, the IDO molecule comprises an amino acid sequence having at least 85%, 90%, 95%, 96%, 97%, 98%, 99% or 100% identity to amino acids 2-714 of SEQ ID NO: 31, or a functional fragment thereof. In an embodiment, the AhR molecule comprises amino acids 2-714 of SEQ ID NO: 31, or a functional fragment thereof.

[0710] In an embodiment, the AhR molecule (e.g., CA-Ahr) comprises an amino acid sequence for a leader sequence and/or an affinity tag (e.g., a leader sequence described herein and/or an affinity tag described herein). In an embodiment, the AhR molecule (e.g., CA-Ahr) does not comprise an amino acid sequence for a leader sequence and/or an affinity tag (e.g., a leader sequence described herein and/or an affinity tag described herein).

[0711] In an embodiment, the polynucleotide encoding the AhR molecule (e.g., CA-Ahr) and optionally, the membrane anchoring moiety comprises a nucleotide sequence (e.g., a codon-optimized nucleotide sequence) having at least 50%, 55%, 60%, 65%, 70%, 75%, 80%, 85%, 90%, 95%, 96%, 97%, 98%, 99% or 100% identity to the sequence of SEQ ID NO: 32, or a functional fragment thereof, or at least 50%, 55%, 60%, 65%, 70%, 75%, 80%, 85%, 90%, 95%, 96%, 97%, 98%, 99% or 100% identity to nucleotides 4-2142 of SEQ ID NO: 32, or a functional fragment thereof. In an embodiment, the polynucleotide (e.g., mRNA) encoding the AhR molecule (e.g., CA-Ahr) and optionally, the membrane anchoring moiety comprises the nucleotide sequence of SEQ ID NO: 32, or a functional fragment thereof, or at least 50%, 55%, 60%, 65%, 70%, 75%, 80%, 85%, 90%, 95%, 96%, 97%, 98%, 99% or 100% identity to nucleotides 4-2142 of SEQ ID NO: 32, or a functional fragment thereof.

[0712] In an embodiment, the polynucleotide (e.g., mRNA) encoding the AhR molecule (e.g., CA-Ahr) and optionally, the membrane anchoring moiety comprises a nucleotide sequence that encodes for a leader sequence and/or an affinity tag (e.g., a leader sequence described herein and/or an affinity tag described herein). In an embodiment, the polynucleotide (e.g., mRNA) encoding the AhR molecule (e.g., CA-Ahr) and optionally, the membrane anchoring moiety does not comprise a nucleotide sequence that encodes for a leader sequence and/or an affinity tag (e.g., a leader sequence described herein and/or an affinity tag described herein).

[0713] In an embodiment, the polynucleotide (e.g., mRNA) encoding the AhR molecule (e.g., CA-Ahr) further comprises one or more elements, e.g., a 5′ UTR and/or a 3′ UTR (e.g., a 5′ UTR described herein and/or a 3′ UTR described herein). In an embodiment, the 5′ UTR and/or 3′UTR comprise one or more micro RNA (mIR) binding sites, e.g., as disclosed herein.

[0714] Exemplary 5′ UTRs and 3′ UTRs are disclosed in the section entitled “5′ UTR and 3′UTR” herein.

[0715] In an aspect, an LNP composition disclosed herein comprises a polynucleotide encoding an AhR molecule (e.g., CA-Ahr), e.g., as described herein. In an embodiment, the AhR molecule (e.g., CA-Ahr) comprises a fusion protein.

[0716] In an aspect, an LNP composition disclosed herein comprises a polynucleotide encoding an AhR molecule (e.g., CA-Ahr), e.g., as described herein. In an embodiment, the AhR molecule (e.g., CA-Ahr) comprises a half-life extender, e.g., a protein (or fragment thereof) that binds to a serum protein such as albumin, IgG, FcRn or transferrin. In an embodiment, the half-life extender is an immunoglobulin Fc region or a variant thereof, e.g., an IgG1 Fc.

[0717] In an embodiment, an LNP composition described herein comprises a polynucleotide encoding an AhR molecule (e.g., CA-Ahr). In an embodiment, the AhR molecule (e.g., CA-Ahr) further comprises a targeting moiety. In an embodiment, the targeting moiety comprises an antibody molecule (e.g., Fab or scFv), a receptor molecule (e.g., a receptor, a receptor fragment or functional variant thereof), a ligand molecule (e.g., a ligand, a ligand fragment or functional variant thereof), or a combination thereof.

[0718] In an embodiment, the AhR molecule (e.g., CA-Ahr) is a chimeric molecule, e.g., comprising an AhR (e.g., CA-Ahr) portion and a non-AhR (e.g., non-CA-Ahr) portion, e.g., a membrane anchoring moiety. In an embodiment, the AhR molecule (e.g., CA-Ahr) encoded by the polynucleotide is a chimeric molecule, e.g., the polynucleotide further comprises a nucleotide sequence encoding a non-AhR (e.g., non-CA-Ahr) portion of the molecule, e.g, a membrane anchoring moiety.

### ALDH1A2 Molecule

[0719] Aldehyde dehydrogenase 1 family, member A2 (ALDH1A2) is an enzyme that catalyzes the synthesis of retinoic acid (RA) from retinaldehyde (Choi et al (2019) Cancers 11(10) 1553; doi:10.3390/cancers). ALDH1A2 belongs to the ALDH1 family which is involved in biological functions such as cell differentiation, cell cycle arrest, and/or apoptosis. The different ALDH1 family members have been thought to play different roles in cancer. For example, ALDH1A2 has been shown to be downregulated in ovarian cancer.

[0720] In an aspect, the disclosure provides an LNP composition comprising a polynucleotide, e.g., encoding an ALDH1A2 molecule, e.g., as described herein.

[0721] In an embodiment the ALDH1A2 molecule comprises a naturally occurring ALDH1A2 molecule, a fragment (e.g., a functional fragment, e.g., a biologically active fragment) of a naturally occurring ALDH1A2 molecule, or a variant thereof. In an embodiment, the ALDH1A2 molecule comprises a variant of a naturally occurring ALDH1A2 molecule (e.g., an ALDH1A2 variant, e.g., as described herein), or a fragment thereof. In an embodiment, the LNP composition comprising a polynucleotide encoding an ALDH1A2 molecule can be administered alone or in combination with an additional agent, e.g., an LNP composition comprising a polynucleotide encoding a different metabolic reprogramming molecule or an LNP composition comprising a polynucleotide encoding a different molecule.

[0722] In an aspect, an LNP composition disclosed herein comprises a polynucleotide encoding an ALDH1A2 molecule. In an embodiment, the ALDH1A2 molecule comprises an ALDH1A2 amino acid sequence described herein or an amino acid sequence having at least 85%, 90%, 95%, 96%, 97%, 98%, 99% identity to an ALDH1A2 amino acid sequence described herein. In an embodiment, the ALDH1A2 molecule comprises an amino acid sequence having at least 85%, 90%, 95%, 96%, 97%, 98%, 99% or 100% identity to an ALDH1A2 amino acid sequence provided in Table 1A, e.g., SEQ ID NO: 29, or a functional fragment thereof. In an embodiment, the ALDH1A2 molecule comprises the amino acid sequence of an ALDH1A2 amino acid sequence provided in Table 1A, e.g., SEQ ID NO: 29, or a functional fragment thereof. In an embodiment, the ALDH1A2 molecule comprises the amino acid sequence of SEQ ID NO: 29, or a functional fragment thereof. In an embodiment, the ALDH1A2 molecule comprises an amino acid sequence having at least 85%, 90%, 95%, 96%, 97%, 98%, 99% or 100% identity to amino acids 2-532 of SEQ ID NO: 29, or a functional fragment thereof. In an embodiment, the ALDH1A2 molecule comprises amino acids 2-532 of SEQ ID NO: 29, or a functional fragment thereof.

[0723] In an embodiment, the ALDH1A2 molecule comprises an amino acid sequence for a leader sequence and/or an affinity tag (e.g., a leader sequence described herein and/or an affinity tag described herein). In an embodiment, the ALDH1A2 molecule does not comprise an amino acid sequence for a leader sequence and/or an affinity tag (e.g., a leader sequence described herein and/or an affinity tag described herein).

[0724] In an embodiment, the polynucleotide encoding the ALDH1A2 molecule and optionally, the membrane anchoring moiety comprises a nucleotide sequence (e.g., a codon-optimized nucleotide sequence) having at least 50%, 55%, 60%, 65%, 70%, 75%, 80%, 85%, 90%, 95%, 96%, 97%, 98%, 99% or 100% identity to the sequence of SEQ ID NO: 30, or a functional fragment thereto, or at least 50%, 55%, 60%, 65%, 70%, 75%, 80%, 85%, 90%, 95%, 96%, 97%, 98%, 99% or 100% identity to nucleotides 4-1596 of SEQ ID NO: 30, or a functional fragment thereof. In an embodiment, the polynucleotide (e.g., mRNA) encoding the ALDH1A2 molecule and optionally, the membrane anchoring moiety comprises the nucleotide sequence of SEQ ID NO: 30, or a functional fragment thereof, or at least 50%, 55%, 60%, 65%, 70%, 75%, 80%, 85%, 90%, 95%, 96%, 97%, 98%, 99% or 100% identity to nucleotides 4-1596 of SEQ ID NO: 30, or a functional fragment thereof.

[0725] In an embodiment, the polynucleotide (e.g., mRNA) encoding the ALDH1A2 molecule and optionally, the membrane anchoring moiety comprises a nucleotide sequence that encodes for a leader sequence and/or an affinity tag (e.g., a leader sequence described herein and/or an affinity tag described herein). In an embodiment, the polynucleotide (e.g., mRNA) encoding the ALDH1A2 molecule and optionally, the membrane anchoring moiety does not comprise a nucleotide sequence that encodes for a leader sequence and/or an affinity tag (e.g., a leader sequence described herein and/or an affinity tag described herein).

[0726] In an embodiment, the polynucleotide (e.g., mRNA) encoding the ALDH1A2 molecule and optionally, the membrane anchoring moiety further comprises one or more elements, e.g., a 5′ UTR and/or a 3′ UTR (e.g., a 5′ UTR described herein and/or a 3′ UTR described herein). In an embodiment, the 5′ UTR and/or 3′UTR comprise one or more micro RNA (mIR) binding sites, e.g., as disclosed herein. Exemplary 5′ UTRs and 3′ UTRs are disclosed in the section entitled “5′ UTR and 3′UTR” herein.

[0727] In an aspect, an LNP composition disclosed herein comprises a polynucleotide encoding an ALDH1A2 molecule, e.g., as described herein. In an embodiment, the ALDH1A2 molecule comprises a fusion protein.

[0728] In an aspect, an LNP composition disclosed herein comprises a polynucleotide encoding an ALDH1A2 molecule, e.g., as described herein. In an embodiment, the ALDH1A2 molecule comprises a half-life extender, e.g., a protein (or fragment thereof) that binds to a serum protein such as albumin, IgG, FcRn or transferrin. In an embodiment, the half-life extender is an immunoglobulin Fc region or a variant thereof, e.g., an IgG1 Fc.

[0729] In an embodiment, an LNP composition described herein comprises a polynucleotide encoding an ALDH1A2 molecule. In an embodiment, the ALDH1A2 molecule further comprises a targeting moiety. In an embodiment, the targeting moiety comprises an antibody molecule (e.g., Fab or scFv), a receptor molecule (e.g., a receptor, a receptor fragment or functional variant thereof), a ligand molecule (e.g., a ligand, a ligand fragment or functional variant thereof), or a combination thereof.

[0730] In an embodiment, the ALDH1A2 molecule is a chimeric molecule, e.g., comprising an ALDH1A2 portion and a non-ALDH1A2 portion, e.g., a membrane anchoring moiety. In an embodiment, the ALDH1A2 molecule encoded by the polynucleotide is a chimeric molecule, e.g., the polynucleotide further comprises a nucleotide sequence encoding a non-ALDH1A2 portion of the molecule, e.g., a membrane anchoring moiety.

### HMOX1 Molecule

[0731] Heme oxygenase (decycling) 1) (HMOX1) is an enzyme which catalyzes oxidative degradation of cellular heme. HMOX1, in addition to having a role in heme catabolism, also has anti-oxidative and/or anti-inflammatory functions (Chau L Y (2015) Journal of Biomedical Science 22 doi.org/10.1186/s12929-015-0128-0). HMOX1 is expressed in organs responsible for degrading senescent red blood cells, e.g., spleen, liver, and/or bone marrow. HMOX1 is also expressed, e.g., in macrophages.

[0732] In an aspect, the disclosure provides an LNP composition comprising a polynucleotide, e.g., encoding an HMOX1 molecule, e.g., as described herein.

[0733] In an embodiment the HMOX1 molecule comprises a naturally occurring HMOX1 molecule, a fragment (e.g., a functional fragment, e.g., a biologically active fragment) of a naturally occurring HMOX1 molecule, or a variant thereof. In an embodiment, the HMOX1 molecule comprises a variant of a naturally occurring HMOX1 molecule (e.g., a HMOX1 variant, e.g., as described herein), or a fragment thereof. In an embodiment, the LNP composition comprising a polynucleotide encoding a HMOX1 molecule can be administered alone or in combination with an additional agent, e.g., an LNP composition comprising a polynucleotide encoding a different metabolic reprogramming molecule or an LNP composition comprising a polynucleotide encoding a different molecule.

[0734] In an aspect, an LNP composition disclosed herein comprises a polynucleotide encoding an HMOX1 molecule. In an embodiment, the HMOX1 molecule comprises an HMOX1 amino acid sequence described herein or an amino acid sequence having at least 85%, 90%, 95%, 96%, 97%, 98%, 99% identity to an HMOX1 amino acid sequence described herein. In an embodiment, the HMOX1 molecule comprises an amino acid sequence having at least 85%, 90%, 95%, 96%, 97%, 98%, 99% or 100% identity to a HMOX1 amino acid sequence provided in Table 1A, e.g., SEQ ID NO: 27, or a functional fragment thereof. In an embodiment, the HMOX1 molecule comprises the amino acid sequence of an HMOX1 amino acid sequence provided in Table 1A, e.g., SEQ ID NO: 27, or a functional fragment thereof. In an embodiment, the HMOX1 molecule comprises the amino acid sequence of SEQ ID NO: 27, or a functional fragment thereof. In an embodiment, the HMOX1 molecule comprises an amino acid sequence having at least 85%, 90%, 95%, 96%, 97%, 98%, 99% or 100% identity to amino acids 2-288 of SEQ ID NO: 27, or a functional fragment thereof. In an embodiment, the HMOX1 molecule comprises amino acids 2-288 of SEQ ID NO: 27, or a functional fragment thereof.

[0735] In an embodiment, the HMOX1 molecule comprises an amino acid sequence for a leader sequence and/or an affinity tag (e.g., a leader sequence described herein and/or an affinity tag described herein). In an embodiment, the HMOX1 molecule does not comprise an amino acid sequence for a leader sequence and/or an affinity tag (e.g., a leader sequence described herein and/or an affinity tag described herein).

[0736] In an embodiment, the polynucleotide encoding the HMOX1 molecule and optionally, the membrane anchoring moiety comprises a nucleotide sequence (e.g., a codon-optimized nucleotide sequence) having at least 50%, 55%, 60%, 65%, 70%, 75%, 80%, 85%, 90%, 95%, 96%, 97%, 98%, 99% or 100% identity to the sequence of SEQ ID NO: 28, or a functional fragment thereof, or at least 50%, 55%, 60%, 65%, 70%, 75%, 80%, 85%, 90%, 95%, 96%, 97%, 98%, 99% or 100% identity to nucleotides 4-864 of SEQ ID NO: 28, or a functional fragment thereof. In an embodiment, the polynucleotide (e.g., mRNA) encoding the HMOX1 molecule and optionally, the membrane anchoring moiety comprises the nucleotide sequence of SEQ ID NO: 28, or a functional fragment thereof, or at least 50%, 55%, 60%, 65%, 70%, 75%, 80%, 85%, 90%, 95%, 96%, 97%, 98%, 99% or 100% identity to nucleotides 4-864 of SEQ ID NO: 28, or a functional fragment thereof.

[0737] In an embodiment, the polynucleotide (e.g., mRNA) encoding the HMOX1 molecule and optionally, the membrane anchoring moiety comprises a nucleotide sequence that encodes for a leader sequence and/or an affinity tag (e.g., a leader sequence described herein and/or an affinity tag described herein). In an embodiment, the polynucleotide (e.g., mRNA) encoding the HMOX1 molecule and optionally, the membrane anchoring moiety does not comprise a nucleotide sequence that encodes for a leader sequence and/or an affinity tag (e.g., a leader sequence described herein and/or an affinity tag described herein).

[0738] In an embodiment, the polynucleotide (e.g., mRNA) encoding the HMOX1 molecule and optionally, the membrane anchoring moiety further comprises one or more elements, e.g., a 5′ UTR and/or a 3′ UTR (e.g., a 5′ UTR described herein and/or a 3′ UTR described herein). In an embodiment, the 5′ UTR and/or 3′UTR comprise one or more micro RNA (mIR) binding sites, e.g., as disclosed herein. Exemplary 5′ UTRs and 3′ UTRs are disclosed in the section entitled “5′ UTR and 3′UTR” herein.

[0739] In an aspect, an LNP composition disclosed herein comprises a polynucleotide encoding a HMOX1 molecule, e.g., as described herein. In an embodiment, the HMOX1 molecule comprises a fusion protein.

[0740] In an aspect, an LNP composition disclosed herein comprises a polynucleotide encoding a HMOX1 molecule, e.g., as described herein. In an embodiment, the HMOX1 molecule comprises a half-life extender, e.g., a protein (or fragment thereof) that binds to a serum protein such as albumin, IgG, FcRn or transferrin. In an embodiment, the half-life extender is an immunoglobulin Fc region or a variant thereof, e.g., an IgG1 Fc.

[0741] In an embodiment, an LNP composition described herein comprises a polynucleotide encoding a HMOX1 molecule. In an embodiment, the HMOX1 molecule further comprises a targeting moiety. In an embodiment, the targeting moiety comprises an antibody molecule (e.g., Fab or scFv), a receptor molecule (e.g., a receptor, a receptor fragment or functional variant thereof), a ligand molecule (e.g., a ligand, a ligand fragment or functional variant thereof), or a combination thereof.

[0742] In an embodiment, the HMOX1 molecule is a chimeric molecule, e.g., comprising an HMOX1 portion and a non-HMOX1 portion, e.g., a membrane anchoring moiety. In an embodiment, the HMOX1 molecule encoded by the polynucleotide is a chimeric molecule, e.g., the polynucleotide further comprises a nucleotide sequence encoding a non-HMOX1 portion of the molecule, e.g., a membrane anchoring moiety.

### Arginase Molecule

[0743] Arginase is a manganese metalloenzyme that catalyzes the conversion of L-arginine to L-ornithine and urea (Caldwell et al (2018) Physiol Rev 98; 61-665). Arginase belongs to the ureohydrolase family of enzymes and in humans, there are at least two isoforms of Arginase, Arginase A1 and Arginase A2. Arginase A1 is expressed in the liver, red blood cells, and specific immune cell populations. Arginase A2 is expressed, e.g., in the kidney. Arginase activity has at least two functions: (1) detoxification of ammonia in the urea cycle; and (2) production of ornithine for the synthesis of proline and polyamines.

[0744] In an aspect, the disclosure provides an LNP composition comprising a polynucleotide, e.g., encoding an Arginase molecule, e.g., as described herein. In an embodiment the Arginase molecule, Arginase 1 or Arginase 2, comprises a naturally occurring Arginase molecule, a fragment (e.g., a functional fragment, e.g., a biologically active fragment) of a naturally occurring Arginase molecule, or a variant thereof. In an embodiment, the Arginase molecule comprises a variant of a naturally occurring Arginase molecule (e.g., an Arginase variant, e.g., as described herein), or a fragment thereof. In an embodiment, the LNP composition comprising a polynucleotide encoding a Arginase molecule can be administered alone or in combination with an additional agent, e.g., an LNP composition comprising a polynucleotide encoding a different metabolic reprogramming molecule or an LNP composition comprising a polynucleotide encoding a different molecule.

[0745] In an aspect, an LNP composition disclosed herein comprises a polynucleotide encoding an Arginase 1 molecule. In an embodiment, the Arginase 1 molecule comprises an Arginase 1 amino acid sequence described herein or an amino acid sequence having at least 85%, 90%, 95%, 96%, 97%, 98%, 99% identity to an Arginase 1 amino acid sequence described herein. In an embodiment, the Arginase 1 molecule comprises an amino acid sequence having at least 85%, 90%, 95%, 96%, 97%, 98%, 99% or 100% identity to an Arginase 1 amino acid sequence provided in Table 1A, e.g., SEQ ID NO: 39, or a functional fragment thereof. In an embodiment, the Arginase 1 molecule comprises the amino acid sequence of an Arginase 1 amino acid sequence provided in Table 1A, e.g., SEQ ID NO: 39, or a functional fragment thereof. In an embodiment, the Arginase 1 molecule comprises the amino acid sequence of SEQ ID NO: 39, or a functional fragment thereof. In an embodiment, the Arginase 1 molecule comprises an amino acid sequence having at least 85%, 90%, 95%, 96%, 97%, 98%, 99% or 100% identity to amino acids 2-322 of SEQ ID NO: 39, or a functional fragment thereof. In an embodiment, the Arginase 1 molecule comprises amino acids 2-322 of SEQ ID NO: 39, or a functional fragment thereof.

[0746] In an embodiment, the polynucleotide encoding the Arginase 1 molecule and optionally, the membrane anchoring moiety comprises a nucleotide sequence (e.g., a codon-optimized nucleotide sequence) having at least 50%, 55%, 60%, 65%, 70%, 75%, 80%, 85%, 90%, 95%, 96%, 97%, 98%, 99% or 100% identity to the sequence of SEQ ID NO: 40, or a functional fragment thereof, or at least 50%, 55%, 60%, 65%, 70%, 75%, 80%, 85%, 90%, 95%, 96%, 97%, 98%, 99% or 100% identity to nucleotides 4-966 of SEQ ID NO: 40, or a functional fragment thereof. In an embodiment, the polynucleotide (e.g., mRNA) encoding the Arginase 1 molecule and optionally, the membrane anchoring moiety comprises the nucleotide sequence of SEQ ID NO: 40, or a functional fragment thereof, or at least 50%, 55%, 60%, 65%, 70%, 75%, 80%, 85%, 90%, 95%, 96%, 97%, 98%, 99% or 100% identity to nucleotides 4-966 of SEQ ID NO: 40, or a functional fragment thereof.

[0747] In an embodiment, the polynucleotide (e.g., mRNA) encoding the Arginase 1 molecule and optionally, the membrane anchoring moiety further comprises one or more elements, e.g., a 5′ UTR and/or a 3′ UTR (e.g., a 5′ UTR described herein and/or a 3′ UTR described herein). In an embodiment, the 5′ UTR and/or 3′UTR comprise one or more micro RNA (mIR) binding sites, e.g., as disclosed herein. Exemplary 5′ UTRs and 3′ UTRs are disclosed in the section entitled “5′ UTR and 3′UTR” herein.

[0748] In an aspect, an LNP composition disclosed herein comprises a polynucleotide encoding an Arginase 1 molecule. In an embodiment, the Arginase 1 molecule comprises an Arginase 1 amino acid sequence described herein or an amino acid sequence having at least 85%, 90%, 95%, 96%, 97%, 98%, 99% identity to an Arginase 1 amino acid sequence described herein. In an embodiment, the Arginase 1 molecule comprises an amino acid sequence having at least 85%, 90%, 95%, 96%, 97%, 98%, 99% or 100% identity to an Arginase 1 amino acid sequence provided in Table 1A, e.g., SEQ ID NO: 37, or a functional fragment thereof. In an embodiment, the Arginase 1 molecule comprises the amino acid sequence of an Arginase 1 amino acid sequence provided in Table 1A, e.g., SEQ ID NO: 37, or a functional fragment thereof. In an embodiment, the Arginase 1 molecule comprises the amino acid sequence of SEQ ID NO: 37, or a functional fragment thereof. In an embodiment, the Arginase 1 molecule comprises an amino acid sequence having at least 85%, 90%, 95%, 96%, 97%, 98%, 99% or 100% identity to amino acids 2-346 of SEQ ID NO: 37, or a functional fragment thereof. In an embodiment, the Arginase 1 molecule comprises amino acids 2-346 of SEQ ID NO: 37, or a functional fragment thereof.

[0749] In an embodiment, the polynucleotide encoding the Arginase 1 molecule and optionally, the membrane anchoring moiety comprises a nucleotide sequence (e.g., a codon-optimized nucleotide sequence) having at least 50%, 55%, 60%, 65%, 70%, 75%, 80%, 85%, 90%, 95%, 96%, 97%, 98%, 99% or 100% identity to the sequence of SEQ ID NO: 38, or a functional fragment thereof, or at least 50%, 55%, 60%, 65%, 70%, 75%, 80%, 85%, 90%, 95%, 96%, 97%, 98%, 99% or 100% identity to nucleotides 4-1038 of SEQ ID NO: 38, or a functional fragment thereof. In an embodiment, the polynucleotide (e.g., mRNA) encoding the Arginase 1 molecule and optionally, the membrane anchoring moiety comprises the nucleotide sequence of SEQ ID NO: 38, or a functional fragment thereof, or at least 50%, 55%, 60%, 65%, 70%, 75%, 80%, 85%, 90%, 95%, 96%, 97%, 98%, 99% or 100% identity to nucleotides 4-1038 of SEQ ID NO: 38, or a functional fragment thereof.

[0750] In an embodiment, the polynucleotide (e.g., mRNA) encoding the Arginase 1 molecule and optionally, the membrane anchoring moiety further comprises one or more elements, e.g., a 5′ UTR and/or a 3′ UTR (e.g., a 5′ UTR described herein and/or a 3′ UTR described herein). In an embodiment, the 5′ UTR and/or 3′UTR comprise one or more micro RNA (mIR) binding sites, e.g., as disclosed herein. Exemplary 5′ UTRs and 3′ UTRs are disclosed in the section entitled “5′ UTR and 3′UTR” herein.

[0751] In an aspect, an LNP composition disclosed herein comprises a polynucleotide encoding an Arginase 2 molecule. In an embodiment, the Arginase 2 molecule comprises an Arginase 2 amino acid sequence described herein or an amino acid sequence having at least 85%, 90%, 95%, 96%, 97%, 98%, 99% identity to an Arginase 2 amino acid sequence described herein. In an embodiment, the Arginase 2 molecule comprises an amino acid sequence having at least 85%, 90%, 95%, 96%, 97%, 98%, 99% or 100% identity to an Arginase 2 amino acid sequence provided in Table 1A, e.g., SEQ ID NO: 41, or a functional fragment thereof. In an embodiment, the Arginase 2 molecule comprises the amino acid sequence of an Arginase 2 amino acid sequence provided in Table 1A, e.g., SEQ ID NO: 41, or a functional fragment thereof. In an embodiment, the Arginase 2 molecule comprises the amino acid sequence of SEQ ID NO: 41, or a functional fragment thereof. In an embodiment, the Arginase 2 molecule comprises an amino acid sequence having at least 85%, 90%, 95%, 96%, 97%, 98%, 99% or 100% identity to amino acids 2-354 of SEQ ID NO: 41, or a functional fragment thereof. In an embodiment, the Arginase 2 molecule comprises amino acids 2-354 of SEQ ID NO: 41, or a functional fragment thereof.

[0752] In an embodiment, the polynucleotide encoding the Arginase 2 molecule and optionally, the membrane anchoring moiety comprises a nucleotide sequence (e.g., a codon-optimized nucleotide sequence) having at least 50%, 55%, 60%, 65%, 70%, 75%, 80%, 85%, 90%, 95%, 96%, 97%, 98%, 99% or 100% identity to the sequence of SEQ ID NO: 42, or a functional fragment thereof, or at least 50%, 55%, 60%, 65%, 70%, 75%, 80%, 85%, 90%, 95%, 96%, 97%, 98%, 99% or 100% identity to nucleotides 4-1062 of SEQ ID NO: 42, or a functional fragment thereof. In an embodiment, the polynucleotide (e.g., mRNA) encoding the Arginase 2 molecule and optionally, the membrane anchoring moiety comprises the nucleotide sequence of SEQ ID NO: 42, or a functional fragment thereof, or at least 50%, 55%, 60%, 65%, 70%, 75%, 80%, 85%, 90%, 95%, 96%, 97%, 98%, 99% or 100% identity to nucleotides 4-1062 of SEQ ID NO: 42, or a functional fragment thereof.

[0753] In an embodiment, the polynucleotide (e.g., mRNA) encoding the Arginase 2 molecule and optionally, the membrane anchoring moiety further comprises one or more elements, e.g., a 5′ UTR and/or a 3′ UTR (e.g., a 5′ UTR described herein and/or a 3′ UTR described herein). In an embodiment, the 5′ UTR and/or 3′UTR comprise one or more micro RNA (mIR) binding sites, e.g., as disclosed herein. Exemplary 5′ UTRs and 3′ UTRs are disclosed in the section entitled “5′ UTR and 3′UTR” herein.

[0754] In an embodiment, the Arginase molecule comprises an amino acid sequence for a leader sequence and/or an affinity tag (e.g., a leader sequence described herein and/or an affinity tag described herein). In an embodiment, the Arginase molecule does not comprise an amino acid sequence for a leader sequence and/or an affinity tag (e.g., a leader sequence described herein and/or an affinity tag described herein).

[0755] In an embodiment, the polynucleotide (e.g., mRNA) encoding the Arginase molecule comprises a nucleotide sequence that encodes for a leader sequence and/or an affinity tag (e.g., a leader sequence described herein and/or an affinity tag described herein). In an embodiment, the polynucleotide (e.g., mRNA) encoding the Arginase molecule does not comprise a nucleotide sequence that encodes for a leader sequence and/or an affinity tag (e.g., a leader sequence described herein and/or an affinity tag described herein).

[0756] In an embodiment, the polynucleotide (e.g., mRNA) encoding the Arginase molecule further comprises one or more elements, e.g., a 5′ UTR and/or a 3′ UTR (e.g., a 5′ UTR described herein and/or a 3′ UTR described herein). In an embodiment, the 5′ UTR and/or 3′UTR comprise one or more micro RNA (mIR) binding sites, e.g., as disclosed herein. Exemplary 5′ UTRs and 3′ UTRs are disclosed in the section entitled “5′ UTR and 3′UTR” herein.

[0757] In an aspect, an LNP composition disclosed herein comprises a polynucleotide encoding an Arginase molecule, e.g., as described herein. In an embodiment, the Arginase molecule comprises a fusion protein.

[0758] In an aspect, an LNP composition disclosed herein comprises a polynucleotide encoding an Arginase molecule, e.g., as described herein. In an embodiment, the Arginase molecule comprises a half-life extender, e.g., a protein (or fragment thereof) that binds to a serum protein such as albumin, IgG, FcRn or transferrin. In an embodiment, the half-life extender is an immunoglobulin Fc region or a variant thereof, e.g., an IgG1 Fc.

[0759] In an embodiment, an LNP composition described herein comprises a polynucleotide encoding an Arginase molecule. In an embodiment, the Arginase molecule further comprises a targeting moiety. In an embodiment, the targeting moiety comprises an antibody molecule (e.g., Fab or scFv), a receptor molecule (e.g., a receptor, a receptor fragment or functional variant thereof), a ligand molecule (e.g., a ligand, a ligand fragment or functional variant thereof), or a combination thereof.

[0760] In an embodiment, the Arginase molecule is a chimeric molecule, e.g., comprising an Arginase portion and a non-Arginase portion, e.g., a membrane anchoring moiety. In an embodiment, the Arginase molecule encoded by the polynucleotide is a chimeric molecule, e.g., the polynucleotide further comprises a nucleotide sequence encoding a non-Arginase portion of the molecule, e.g., a membrane anchoring moiety.

### CD73 Molecule

[0761] CD73, also known as 5′ nucleotidase or ecto-5′-nucleotidase, is an enzyme which is encoded by the NT5E gene. CD73, along with CD39, convert extracellular ATP to extracellular adenosine. CD39 catalyzes the breakdown of ATP and ADP to AMP, and CD73 converts AMP to adenosine (de Leve et al. (2019) Front. Immunol. doi.org/10.3389/fimmu.2019.00698). CD73 is expressed on the surface of lymphocyte subpopulations such as T regulatory cells, B regulatory cells and endothelial cells. In addition, CD73 is also expressed on stromal cells, mesenchymal stem cells and/or tumor-associated stem cells. CD73 expression on stromal cells has been shown e.g., to suppress an immune-mediated response. Furthermore, CD39 and/or CD73 dependent generation of adenosine may also, e.g., have an effect on T cell biology such as T cell homeostasis, memory cell survival and/or differentiation.

[0762] In an aspect, the disclosure provides an LNP composition comprising a polynucleotide, e.g., encoding a CD73 molecule, e.g., as described herein.

[0763] In an embodiment the CD73 molecule comprises a naturally occurring CD73 molecule, a fragment (e.g., a functional fragment, e.g., a biologically active fragment) of a naturally occurring CD73 molecule, or a variant thereof. In an embodiment, the CD73 molecule comprises a variant of a naturally occurring CD73 molecule (e.g., a CD73 variant, e.g., as described herein), or a fragment thereof. In an embodiment, the LNP composition comprising a polynucleotide encoding a CD73 molecule can be administered alone or in combination with an additional agent, e.g., an LNP composition comprising a polynucleotide encoding a different metabolic reprogramming molecule or an LNP composition comprising a polynucleotide encoding a different molecule.

[0764] In an aspect, an LNP composition disclosed herein comprises a polynucleotide encoding a CD73 molecule. In an embodiment, the CD73 molecule comprises a CD73 amino acid sequence described herein or an amino acid sequence having at least 85%, 90%, 95%, 96%, 97%, 98%, 99% identity to a CD73 amino acid sequence described herein. In an embodiment, the CD73 molecule comprises an amino acid sequence having at least 85%, 90%, 95%, 96%, 97%, 98%, 99%, or 100% identity to a CD73 amino acid sequence provided in Table 1A, e.g., SEQ ID NO: 33, or a functional fragment thereof. In an embodiment, the CD73 molecule comprises the amino acid sequence of a CD73 amino acid sequence provided in Table 1A, e.g., SEQ ID NO: 33, or a functional fragment thereof. In an embodiment, the CD73 molecule comprises the amino acid sequence of SEQ ID NO: 33, or a functional fragment thereof. In an embodiment, the CD73 molecule comprises an amino acid sequence having at least 85%, 90%, 95%, 96%, 97%, 98%, 99%, or 100% identity to amino acids 2-589 of SEQ ID NO: 33, or a functional fragment thereof. In an embodiment, the CD73 molecule comprises amino acids 2-589 of SEQ ID NO: 33, or a functional fragment thereof.

[0765] In an embodiment, the CD73 molecule comprises an amino acid sequence for a leader sequence and/or an affinity tag (e.g., a leader sequence described herein and/or an affinity tag described herein). In an embodiment, the CD73 molecule does not comprise an amino acid sequence for a leader sequence and/or an affinity tag (e.g., a leader sequence described herein and/or an affinity tag described herein).

[0766] In an embodiment, the polynucleotide encoding the CD73 molecule and optionally, the membrane anchoring moiety comprises a nucleotide sequence (e.g., a codon-optimized nucleotide sequence) having at least 50%, 55%, 60%, 65%, 70%, 75%, 80%, 85%, 90%, 95%, 96%, 97%, 98%, 99% or 100% identity to the sequence of SEQ ID NO: 34, or a functional fragment thereof, or at least 50%, 55%, 60%, 65%, 70%, 75%, 80%, 85%, 90%, 95%, 96%, 97%, 98%, 99% or 100% identity to nucleotides 4-1767 of SEQ ID NO: 34, or a functional fragment thereof. In an embodiment, the polynucleotide (e.g., mRNA) encoding the CD73 molecule and optionally, the membrane anchoring moiety comprises the nucleotide sequence of SEQ ID NO: 34, or a functional fragment thereof, or at least 50%, 55%, 60%, 65%, 70%, 75%, 80%, 85%, 90%, 95%, 96%, 97%, 98%, 99% or 100% identity to nucleotides 4-1767 of SEQ ID NO: 34, or a functional fragment thereof.

[0767] In an embodiment, the polynucleotide (e.g., mRNA) encoding the CD73 molecule and optionally, the membrane anchoring moiety comprises a nucleotide sequence that encodes for a leader sequence and/or an affinity tag (e.g., a leader sequence described herein and/or an affinity tag described herein). In an embodiment, the polynucleotide (e.g., mRNA) encoding the CD73 molecule does not comprise a nucleotide sequence that encodes for a leader sequence and/or an affinity tag (e.g., a leader sequence described herein and/or an affinity tag described herein).

[0768] In an embodiment, the polynucleotide (e.g., mRNA) encoding the CD73 molecule and optionally, the membrane anchoring moiety further comprises one or more elements, e.g., a 5′ UTR and/or a 3′ UTR (e.g., a 5′ UTR described herein and/or a 3′ UTR described herein). In an embodiment, the 5′ UTR and/or 3′UTR comprise one or more micro RNA (mIR) binding sites, e.g., as disclosed herein. Exemplary 5′ UTRs and 3′ UTRs are disclosed in the section entitled “5′ UTR and 3′UTR” herein.

[0769] In an aspect, an LNP composition disclosed herein comprises a polynucleotide encoding a CD73 molecule, e.g., as described herein. In an embodiment, the CD73 molecule comprises a fusion protein.

[0770] In an aspect, an LNP composition disclosed herein comprises a polynucleotide encoding a CD73 molecule, e.g., as described herein. In an embodiment, the CD73 molecule comprises a half-life extender, e.g., a protein (or fragment thereof) that binds to a serum protein such as albumin, IgG, FcRn or transferrin. In an embodiment, the half-life extender is an immunoglobulin Fc region or a variant thereof, e.g., an IgG1 Fc.

[0771] In an embodiment, an LNP composition described herein comprises a polynucleotide encoding a CD73 molecule. In an embodiment, the CD73 molecule further comprises a targeting moiety. In an embodiment, the targeting moiety comprises an antibody molecule (e.g., Fab or scFv), a receptor molecule (e.g., a receptor, a receptor fragment or functional variant thereof), a ligand molecule (e.g., a ligand, a ligand fragment or functional variant thereof), or a combination thereof.

[0772] In an embodiment, the CD73 molecule is a chimeric molecule, e.g., comprising a CD73 portion and a non-CD73 portion, e.g., a membrane anchoring moiety. In an embodiment, the CD73 molecule encoded by the polynucleotide is a chimeric molecule, e.g., the polynucleotide further comprises a nucleotide sequence encoding a non-CD73 portion of the molecule, e.g., a membrane anchoring moiety.

### CD39 Molecule

[0773] CD39, also known as Ectonucleoside triphosphate diphosphohydrolase-1, is an enzyme which is encoded by the ENTPD1 gene. CD39, along with CD73, convert extracellular ATP to extracellular adenosine. CD39 catalyzes the breakdown of ATP and ADP to AMP, and CD73 converts AMP to adenosine (de Leve et al. (2019) Front. Immunol. doi.org/10.3389/fimmu. 2019.00698). CD39 is expressed on the surface of lymphocyte subpopulations such as T regulatory cells, B regulatory cells and/or endothelial cells. CD39 and/or CD73 dependent generation of adenosine may also, e.g., have an effect on T cell biology such as T cell homeostasis, memory cell survival, and/or differentiation.

[0774] In an aspect, the disclosure provides an LNP composition comprising a polynucleotide, e.g., encoding a CD39 molecule, e.g., as described herein.

[0775] In an embodiment the CD39 molecule comprises a naturally occurring CD39 molecule, a fragment (e.g., a functional fragment, e.g., a biologically active fragment) of a naturally occurring CD39 molecule, or a variant thereof. In an embodiment, the CD39 molecule comprises a variant of a naturally occurring CD39 molecule (e.g., a CD39 variant, e.g., as described herein), or a fragment thereof. In an embodiment, the LNP composition comprising a polynucleotide encoding a CD39 molecule can be administered alone or in combination with an additional agent, e.g., an LNP composition comprising a polynucleotide encoding a different metabolic reprogramming molecule or an LNP composition comprising a polynucleotide encoding a different molecule.

[0776] In an aspect, an LNP composition disclosed herein comprises a polynucleotide encoding a CD39 molecule. In an embodiment, the CD39 molecule comprises a CD39 amino acid sequence described herein or an amino acid sequence having at least 85%, 90%, 95%, 96%, 97%, 98%, 99% identity to a CD39 amino acid sequence described herein. In an embodiment, the CD39 molecule comprises an amino acid sequence having at least 85%, 90%, 95%, 96%, 97%, 98%, 99%, or 100% identity to a CD39 amino acid sequence provided in Table 1A, e.g., SEQ ID NO: 35, or a functional fragment thereof. In an embodiment, the CD39 molecule comprises the amino acid sequence of a CD39 amino acid sequence provided in Table 1A, e.g., SEQ ID NO: 35, or a functional fragment thereof. In an embodiment, the CD39 molecule comprises the amino acid sequence of SEQ ID NO: 35, or a functional fragment thereof. In an embodiment, the CD39 molecule comprises an amino acid sequence having at least 85%, 90%, 95%, 96%, 97%, 98%, 99% or 100% identity to amino acids 2-525 of SEQ ID NO: 35, or a functional fragment thereof. In an embodiment, the CD39 molecule comprises amino acids 2-525 of SEQ ID NO: 35, or a functional fragment thereof.

[0777] In an embodiment, the CD39 molecule comprises an amino acid sequence for a leader sequence and/or an affinity tag (e.g., a leader sequence described herein and/or an affinity tag described herein). In an embodiment, the CD39 molecule does not comprise an amino acid sequence for a leader sequence and/or an affinity tag (e.g., a leader sequence described herein and/or an affinity tag described herein).

[0778] In an embodiment, the polynucleotide encoding the CD39 molecule and optionally, the membrane anchoring moiety comprises a nucleotide sequence (e.g., a codon-optimized nucleotide sequence) having at least 50%, 55%, 60%, 65%, 70%, 75%, 80%, 85%, 90%, 95%, 96%, 97%, 98%, 99% or 100% identity to the sequence of SEQ ID NO: 36, or a functional fragment thereof, or at least 50%, 55%, 60%, 65%, 70%, 75%, 80%, 85%, 90%, 95%, 96%, 97%, 98%, 99% or 100% identity to nucleotides 4-1575 of SEQ ID NO: 36, or a functional fragment thereof. In an embodiment, the polynucleotide (e.g., mRNA) encoding the CD39 molecule and optionally, the membrane anchoring moiety comprises the nucleotide sequence of SEQ ID NO: 36, or a functional fragment thereof, or at least 50%, 55%, 60%, 65%, 70%, 75%, 80%, 85%, 90%, 95%, 96%, 97%, 98%, 99% or 100% identity to nucleotides 4-1575 of SEQ ID NO: 36, or a functional fragment thereof.

[0779] In an embodiment, the polynucleotide (e.g., mRNA) encoding the CD39 molecule and optionally, the membrane anchoring moiety comprises a nucleotide sequence that encodes for a leader sequence and/or an affinity tag (e.g., a leader sequence described herein and/or an affinity tag described herein). In an embodiment, the polynucleotide (e.g., mRNA) encoding the CD39 molecule and optionally, the membrane anchoring moiety does not comprise a nucleotide sequence that encodes for a leader sequence and/or an affinity tag (e.g., a leader sequence described herein and/or an affinity tag described herein).

[0780] In an embodiment, the polynucleotide (e.g., mRNA) encoding the CD39 molecule and optionally, the membrane anchoring moiety further comprises one or more elements, e.g., a 5′ UTR and/or a 3′ UTR (e.g., a 5′ UTR described herein and/or a 3′ UTR described herein). In an embodiment, the 5′ UTR and/or 3′UTR comprise one or more micro RNA (mIR) binding sites, e.g., as disclosed herein. Exemplary 5′ UTRs and 3′ UTRs are disclosed in the section entitled “5′ UTR and 3′UTR” herein.

[0781] In an aspect, an LNP composition disclosed herein comprises a polynucleotide encoding a CD39 molecule, e.g., as described herein. In an embodiment, the CD39 molecule comprises a fusion protein.

[0782] In an aspect, an LNP composition disclosed herein comprises a polynucleotide encoding a CD39 molecule, e.g., as described herein. In an embodiment, the CD39 molecule comprises a half-life extender, e.g., a protein (or fragment thereof) that binds to a serum protein such as albumin, IgG, FcRn or transferrin. In an embodiment, the half-life extender is an immunoglobulin Fc region or a variant thereof, e.g., an IgG1 Fc.

[0783] In an embodiment, an LNP composition described herein comprises a polynucleotide encoding a CD39 molecule. In an embodiment, the CD39 molecule further comprises a targeting moiety. In an embodiment, the targeting moiety comprises an antibody molecule (e.g., Fab or scFv), a receptor molecule (e.g., a receptor, a receptor fragment or functional variant thereof), a ligand molecule (e.g., a ligand, a ligand fragment or functional variant thereof), or a combination thereof.

[0784] In an embodiment, the CD39 molecule is a chimeric molecule, e.g., comprising a CD39 portion and a non-CD39 portion, e.g., a membrane anchoring moiety. In an embodiment, the CD39 molecule encoded by the polynucleotide is a chimeric molecule, e.g., the polynucleotide further comprises a nucleotide sequence encoding a non-CD39 portion of the molecule, e.g., a membrane anchoring moiety.

### Membrane Anchoring Moieties

[0785] In some embodiments, the membrane anchoring moiety comprises a peptide or polypeptide derived from a lipid-anchored protein. Lipid-anchored proteins are proteins typically located on the surface of the cell membrane that are covalently attached to lipids embedded within the cell membrane. The three main type of lipid-anchored proteins are prenylated proteins, fatty acylated proteins, and glycosylphosphatidylinositol (GPI)-anchored proteins.

[0786] Prenylated proteins have covalently attached hydrophobic isoprene polymers at cysteine residues of the protein. An exemplary prenylated protein is Ras, which undergoes prenylation via farnesyltransferase.

[0787] Fatty acylated proteins are protein that have been post-translationally modified to include the covalent attachment of fatty acid at certain amino acid residue. In N-myristylation, the myristic acid (14-carbon) is attached to the a-amino group of an N-terminal glycine residue through an amide linkage. Scr-family tyrosine kinases fatty acylated proteins that are known to localize to the cytoplasmic face of the plasma membrane through lipid modification.

[0788] GPI-anchored proteins are ubiquitously expressed at the surface of cells and rely on a complex glycolipid, rather than a hydrophobic transmembrane sequence to associate with the membrane.

[0789] Without wishing to be bound by theory it is believed that the anchoring moieties described herein can anchor the metabolic reprogramming molecules described herein to the cellular membrane, thereby increasing expression and/or function of the metabolic reprogramming molecules.

[0790] In some embodiments, the membrane anchoring moiety comprises a peptide or polypeptide derived from a prenylated protein. In some embodiments, the prenylated protein is a RAS GTPase. In some embodiments, the membrane anchoring moiety is a RAS anchoring moiety, e.g., comprising a peptide or polypeptide derived from a RAS GTPase that is capable of anchoring a metabolic reprogramming molecule described herein to the cell membrane. In some embodiments, the membrane anchoring moiety (e.g., RAS anchoring) is a KRAS anchoring moiety comprising the sequence of YRLKKISKEEKTPGCVKIKKC (SEQ ID NO: 501), or an amino acid sequence differing by no more than 1, 2, 3, 4, or 5 amino acids, or a functional fragment thereof. In certain embodiments, the membrane anchoring moiety (e.g., KRAS anchoring moiety) comprises or consists of the sequence of SEQ ID NO: 501.

[0791] In some embodiments, the membrane anchoring moiety comprises a peptide or polypeptide derived from a fatty acylated protein. In some embodiments, the fatty acylated protein is a SRC-family tyrosine kinase. In some embodiments, the membrane anchoring moiety is a SRC-family tyrosine kinase anchoring moiety, e.g., comprising a peptide or polypeptide derived from a SRC-family tyrosine kinase that is capable of anchoring a metabolic reprogramming molecule described herein to the cell membrane. In some embodiments, the membrane anchoring moiety (e.g., the SRC-family tyrosine kinase anchoring moiety) is a SRC anchoring moiety. In some embodiments, the SRC anchoring moiety comprises a SRC myristylation sequence. In some embodiments, the membrane anchoring moiety is a SRC anchoring moiety comprising the sequence GSSKSKPKDPSQRRR (SEQ ID NO: 500), or an amino acid sequence differing by no more than 1, 2, 3, 4, or 5 amino acids, or a functional fragment thereof. In certain embodiments, the membrane anchoring moiety (e.g., the SRC anchoring moiety) comprises or consists of the sequence of SEQ ID NO: 500.

[0792] In some embodiments, the membrane anchoring moiety comprises peptide or polypeptide derived from a glycosylphosphatidylinositol (GPI)-anchored protein. In some embodiments, the membrane anchoring moiety is a GPI-anchored protein anchoring moiety, e.g., comprising a peptide or polypeptide derived from GPI-anchored protein that is capable of anchoring a metabolic reprogramming molecule described herein to the cell membrane.

The membrane anchoring moiety and the metabolic reprogramming moiety can be coupled, e.g., to form a fusion protein. In some embodiments, the membrane anchoring moiety is located N-terminal to the metabolic reprogramming molecule, e.g., the C-terminus of the membrane anchoring moiety is coupled (e.g., fused) to the N-terminus of the metabolic reprogramming molecule. In some embodiments, the membrane anchoring moiety is located C-terminal to the metabolic reprogramming molecule, e.g., the N-terminus of the membrane anchoring moiety is coupled (e.g., fused) to the C-terminus of the metabolic reprogramming molecule. In some embodiments, the membrane anchoring moiety is coupled (e.g., fused) directly to the metabolic reprogramming molecule. In some embodiments, the membrane anchoring moiety is coupled (e.g., fused) indirectly to the metabolic reprogramming molecule, e.g., by a linker.

TABLE 1A
Exemplary metabolic reprogramming molecule sequences

| SEQ ID | Sequence | |
|---|---|---|
| NO | information | Sequence |
| 1 | Human IDO | MGSSKSKPKDPSQRRRGGGSAHAMENSWTISKEYHIDEEVG |
| | amino acid, | FALPNPQENLPDFYNDWMFIAKHLPDLIESGQLRERVEKLN |
| | Variant 1 | MLSIDHLTDHKSQRLARLVLGCITMAYVWGKGHGDVRKVLP |
| | | RNIAVPYCQLSKKLELPPILVYADCVLANWKKKDPNKPLTY |
| | | ENMDVLFSFRDGDCSKGFFLVSLLVEIAAASAIKVIPTVFK |
| | | AMQMQERDTLLKALLEIASCLEKALQVFHQIHDHVNPKAFF |
| | | SVLRIYLSGWKGNPQLSDGLVYEGFWEDPKEFAGGSAGQSS |
| | | VFQCFDVLLGIQQTAGGGHAAQFLQDMRRYMPPAHRNFLCS |
| | | LESNPSVREFVLSKGDAGLREAYDACVKALVSLRSYHLQIV |
| | | TKYILIPASQQPKENKTSEDPSKLEAKGTGGTDLMNFLKTV |
| | | RSTTEKSLLKEGGKPIPNPLLGLDST |
| 2 | Human IDO | AUGGGCAGCAGCAAGAGCAAGCCUAAGGACCCUAGCCA |
| | nucleotide 1, | GAGAAGAAGAGGCGGAGGCUCCGCCCACGCCAUGGAGA |
| | Variant 1 | ACAGCUGGACCAUCAGCAAGGAGUACCACAUCGACGAG |
| | | GAGGUGGGCUUCGCCCUGCCUAACCCUCAGGAGAACCU |
| | | GCCUGACUUCUACAACGACUGGAUGUUCAUCGCCAAGC |
| | | ACUUGCCGGACCUGAUCGAGAGCGGCCAGCUGAGAGAG |
| | | AGAGUGGAGAAGCUGAACAUGCUGAGCAUCGACCACCU |
| | | GACCGACCACAAGAGCCAGAGACUGGCCAGACUGGUGC |
| | | UGGGCUGCAUCACCAUGGCCUACGUGUGGGGCAAGGGC |
| | | CACGGCGACGUGAGAAAGGUGCUGCCUAGAAACAUCGC |
| | | CGUGCCUUACUGCCAGCUGAGCAAGAAGCUGGAGCUGC |
| | | CUCCUAUCCUGGUGUACGCCGACUGCGUGCUGGCCAAC |
| | | UGGAAGAAGAAGGACCCUAACAAGCCUCUGACCUACGA |
| | | GAACAUGGACGUGCUGUUCAGCUUCAGAGACGGCGACU |
| | | GCAGCAAGGGCUUCUUCCUGGUGAGCCUGCUGGUGGAG |
| | | AUCGCCGCCGCCAGCGCCAUCAAGGUGAUCCCUACCGU |
| | | GUUCAAGGCCAUGCAGAUGCAGGAGAGAGACACCCUGC |
| | | UGAAGGCCCUGUUGGAGAUAGCCAGCUGCCUGGAGAAG |
| | | GCACUGCAGGUGUUCCACCAGAUCCACGACCACGUGAA |
| | | CCCUAAGGCCUUCUUCAGCGUGCUGAGAAUCUACCUGA |
| | | GCGGCUGGAAGGGCAACCCUCAGCUGAGCGACGGCCUG |
| | | GUCUACGAGGGCUUCUGGGAGGACCCUAAGGAGUUCGC |
| | | UGGCGGCUCUGCCGGCCAGAGCAGCGUGUUCCAGUGCU |
| | | UCGACGUGCUGCUGGGCAUCCAACAAACCGCAGGAGGC |
| | | GGCCACGCUGCACAGUUCCUGCAGGACAUGAGAAGAUA |
| | | CAUGCCUCCUGCCCACAGAAACUUCCUGUGCAGCCUGG |
| | | AGAGCAACCCUAGCGUGAGAGAGUUCGUGCUGAGCAAG |
| | | GGCGACGCCGGCCUGAGAGAGGCCUACGACGCCUGCGU |
| | | UAAGGCCCUUGUGUCUCUGAGAAGCUACCACCUGCAGA |
| | | UCGUGACCAAGUACAUCCUGAUCCCUGCCAGCCAGCAG |
| | | CCUAAGGAGAACAAGACCAGCGAGGACCCAAGCAAGCU |
| | | GGAGGCCAAGGGCACCGGCGGCACCGACCUGAUGAACU |
| | | UCCUGAAGACCGUGAGAAGCACCACCGAGAAGUCCCUC |
| | | CUGAAGGAGGGCGGCAAGCCUAUCCCUAACCCUCUGCU |
| | | GGGCCUGGACAGCACC |
| 3 | Human IDO | AUGGGGUCGUCGAAGUCGAAGCCGAAAGAUCCUAGUCA |
| | nucleotide 2, | GCGCAGGAGGGGAGGAGGAUCCGCCCACGCCAUGGAGA |
| | Variant 1 | ACAGCUGGACCAUCAGCAAGGAGUACCACAUCGACGAG |
| | | GAGGUGGGCUUCGCCCUGCCCAACCCACAGGAGAACCU |
| | | GCCCGACUUCUACAACGACUGGAUGUUCAUCGCCAAGC |
| | | ACCUGCCCGACCUGAUCGAGAGCGGGCAGCUGCGGGAA |
| | | CGGGUGGAGAAGCUGAACAUGCUGAGCAUCGACCACCU |
| | | GACCGACCACAAGUCCCAGCGGUUGGCUCGGCUGGUGC |
| | | UGGGCUGCAUCACCAUGGCCUACGUGUGGGGAAAGGGG |
| | | CACGGUGACGUGCGGAAGGUGCUGCCCCGCAACAUCGC |
| | | CGUGCCCUACUGCCAGCUGAGCAAGAAGCUGGAGCUGC |
| | | CUCCGAUCCUGGUGUACGCCGACUGCGUGCUGGCCAAC |
| | | UGGAAGAAGAAGGACCCCAACAAGCCCCUGACCUACGA |
| | | GAACAUGGACGUGCUGUUCUCCUUCCGGGACGGGGACU |
| | | GCAGCAAGGGGUUCUUCCUGGUGAGCCUGCUGGUGGAG |
| | | AUCGCCGCCGCCUCUGCCAUCAAGGUGAUCCCCACCGUG |
| | | UUCAAGGCCAUGCAGAUGCAGGAGAGGGACACCCUGCU |
| | | GAAGGCCCUGCUGGAGAUCGCCAGCUGCCUGGAGAAGG |
| | | CCCUGCAGGUGUUCCACCAGAUCCACGACCACGUGAAC |
| | | CCCAAGGCCUUCUUCAGCGUGCUGCGCAUCUACCUGUC |
| | | CGGCUGGAAGGGCAAUCCCCAGCUGAGCGACGGCCUGG |
| | | UGUACGAGGGCUUCUGGGAGGACCCCAAGGAAUUUGCU |
| | | GGCGGUAGCGCUGGCCAGUCCAGCGUGUUCCAGUGCUU |
| | | CGACGUGCUGCUGGGCAUUCAGCAAACCGCUGGAGGCG |
| | | GACACGCUGCCCAGUUCCUGCAGGACAUGCGGCGGUAC |
| | | AUGCCACCGGCCCACCGCAACUUCCUGUGCUCCCUGGAG |
| | | AGCAACCCCUCCGUGCGGGAGUUCGUGCUGUCCAAGGG |
| | | CGACGCCGGACUGAGGGAGGCCUACGACGCCUGCGUGA |
| | | AGGCCCUGGUGUCCCUGCGCAGCUACCACCUGCAGAUC |
| | | GUGACCAAGUACAUCCUGAUCCCCGCAAGCCAGCAGCC |
| | | CAAGGAGAACAAGACCAGCGAGGACCCCUCCAAGCUGG |
| | | AAGCUAAGGGCACCGGCGGCACUGACCUGAUGAACUUC |
| | | CUGAAGACCGUGCGGAGCACCACCGAGAAGAGCCUGCU |
| | | GAAGGAGGGCGGGAAGCCGAUCCCGAAUCCCCUCCUCG |
| | | GGCUCGACUCGACG |
| 24 | Human IDO, | AUGGGAUCUUCUAAAUCUAAACCUAAAGAUCCUUCUCA |
| | nucleotide 3, | AAGAAGAAGAGGAGGAGGAUCUGCUCAUGCUAUGGAGA |
| | Variant 1 | AUUCUUGGACAAUUUCUAAAGAAUAUCAUAUUGAUGAA |
| | | GAAGUUGGAUUUGCUCUUCCCAACCCACAGGAGAACCU |
| | | GCCCGACUUCUACAACGACUGGAUGUUCAUCGCCAAGC |
| | | ACCUGCCCGACCUGAUCGAGAGCGGGCAGCUGCGGGAA |
| | | CGGGUGGAGAAGCUGAACAUGCUGAGCAUCGACCACCU |
| | | GACCGACCACAAGUCCCAGCGGUUGGCUCGGCUGGUGC |
| | | UGGGCUGCAUCACCAUGGCCUACGUGUGGGGAAAGGGG |
| | | CACGGUGACGUGCGGAAGGUGCUGCCCCGCAACAUCGC |
| | | CGUGCCCUACUGCCAGCUGAGCAAGAAGCUGGAGCUGC |
| | | CUCCGAUCCUGGUGUACGCCGACUGCGUGCUGGCCAAC |
| | | UGGAAGAAGAAGGACCCCAACAAGCCCCUGACCUACGA |
| | | GAACAUGGACGUGCUGUUCUCCUUCCGGGACGGGGACU |
| | | GCAGCAAGGGGUUCUUCCUGGUGAGCCUGCUGGUGGAG |
| | | AUCGCCGCCGCCUCUGCCAUCAAGGUGAUCCCCACCGUG |
| | | UUCAAGGCCAUGCAGAUGCAGGAGAGGGACACCCUGCU |
| | | GAAGGCCCUGCUGGAGAUCGCCAGCUGCCUGGAGAAGG |
| | | CCCUGCAGGUGUUCCACCAGAUCCACGACCACGUGAAC |
| | | CCCAAGGCCUUCUUCAGCGUGCUGCGCAUCUACCUGUC |
| | | CGGCUGGAAGGGCAAUCCCCAGCUGAGCGACGGCCUGG |
| | | UGUACGAGGGCUUCUGGGAGGACCCCAAGGAAUUUGCU |
| | | GGCGGUAGCGCUGGCCAGUCCAGCGUGUUCCAGUGCUU |
| | | CGACGUGCUGCUGGGCAUUCAGCAAACCGCUGGAGGCG |
| | | GACACGCUGCCCAGUUCCUGCAGGACAUGCGGCGGUAC |
| | | AUGCCACCGGCCCACCGCAACUUCCUGUGCUCCCUGGAG |
| | | AGCAACCCCUCCGUGCGGGAGUUCGUGCUGUCCAAGGG |
| | | CGACGCCGGACUGAGGGAGGCCUACGACGCCUGCGUGA |
| | | AGGCCCUGGUGUCCCUGCGCAGCUACCACCUGCAGAUC |
| | | GUGACCAAGUACAUCCUGAUCCCCGCAAGCCAGCAGCC |
| | | CAAGGAGAACAAGACCAGCGAGGACCCCUCCAAGCUGG |
| | | AAGCUAAGGGCACCGGCGGCACUGACCUGAUGAACUUC |
| | | CUGAAGACCGUGCGGAGCACCACCGAGAAGAGCCUGCU |
| | | GAAGGAGGGCGGGAAGCCGAUCCCGAAUCCCCUCCUCG |
| | | GGCUCGACUCGACG |
| 4 | Human IDO | MGSSKSKPKDPSQRRRGGGSAHAMENSWTISKEYHIDEEVG |
| | amino acid, | FALPNPQENLPDFYNDWMFIAKHLPDLIESGQLRERVEKLN |
| | Variant 2 | MLSIDHLTDHKSQRLARLVLGCITMAYVWGKGHGDVRKVL |
| | | PRNIAVPYCQLSKKLELPPILVYADCVLANWKKKDPNKPLT |
| | | YENMDVLFSFRDGDCSKGFFLVSLLVEIAAASAIKVIPTVFK |
| | | AMQMQERDTLLKALLEIASCLEKALQVFHQIHDHVNPKAFF |
| | | SVLRIYLSGWKGNPQLSDGLVYEGFWEDPKEFAGGSAGQSS |
| | | VFQCFDVLLGIQQTAGGGHAAQFLQDMRRYMPPAHRNFLC |
| | | SLESNPSVREFVLSKGDAGLREAYDACVKALVSLRSYHLQI |
| | | VTKYILIPASQQPKENKTSEDPSKLEAKGTGGTDLMNFLKTV |
| | | RSTTEKSLLKEG |
| 5 | Human IDO | AUGGGGUCGUCGAAGUCGAAGCCGAAAGAUCCUAGUCA |
| | nucleotide, | GCGCAGGAGGGGAGGAGGAUCCGCCCACGCCAUGGAGA |
| | Variant 2 | ACAGCUGGACCAUCAGCAAGGAGUACCACAUCGACGAG |
| | | GAGGUGGGCUUCGCCCUGCCCAACCCACAGGAGAACCU |
| | | GCCCGACUUCUACAACGACUGGAUGUUCAUCGCCAAGC |
| | | ACCUGCCCGACCUGAUCGAGAGCGGGCAGCUGCGGGAA |
| | | CGGGUGGAGAAGCUGAACAUGCUGAGCAUCGACCACCU |
| | | GACCGACCACAAGUCCCAGCGGUUGGCUCGGCUGGUGC |
| | | UGGGCUGCAUCACCAUGGCCUACGUGUGGGGAAAGGGG |
| | | CACGGUGACGUGCGGAAGGUGCUGCCCCGCAACAUCGC |
| | | CGUGCCCUACUGCCAGCUGAGCAAGAAGCUGGAGCUGC |
| | | CUCCGAUCCUGGUGUACGCCGACUGCGUGCUGGCCAAC |
| | | UGGAAGAAGAAGGACCCCAACAAGCCCCUGACCUACGA |
| | | GAACAUGGACGUGCUGUUCUCCUUCCGGGACGGGGACU |
| | | GCAGCAAGGGGUUCUUCCUGGUGAGCCUGCUGGUGGAG |
| | | AUCGCCGCCGCCUCUGCCAUCAAGGUGAUCCCCACCGUG |
| | | UUCAAGGCCAUGCAGAUGCAGGAGAGGGACACCCUGCU |
| | | GAAGGCCCUGCUGGAGAUCGCCAGCUGCCUGGAGAAGG |
| | | CCCUGCAGGUGUUCCACCAGAUCCACGACCACGUGAAC |
| | | CCCAAGGCCUUCUUCAGCGUGCUGCGCAUCUACCUGUC |
| | | CGGCUGGAAGGGCAAUCCCCAGCUGAGCGACGGCCUGG |
| | | UGUACGAGGGCUUCUGGGAGGACCCCAAGGAAUUUGCU |
| | | GGCGGUAGCGCUGGCCAGUCCAGCGUGUUCCAGUGCUU |
| | | CGACGUGCUGCUGGGCAUUCAGCAAACCGCUGGAGGCG |
| | | GACACGCUGCCCAGUUCCUGCAGGACAUGCGGCGGUAC |
| | | AUGCCACCGGCCCACCGCAACUUCCUGUGCUCCCUGGAG |
| | | AGCAACCCCUCCGUGCGGGAGUUCGUGCUGUCCAAGGG |
| | | CGACGCCGGACUGAGGGAGGCCUACGACGCCUGCGUGA |
| | | AGGCCCUGGUGUCCCUGCGCAGCUACCACCUGCAGAUC |
| | | GUGACCAAGUACAUCCUGAUCCCCGCAAGCCAGCAGCC |
| | | CAAGGAGAACAAGACCAGCGAGGACCCCUCCAAGCUGG |
| | | AAGCUAAGGGCACCGGCGGCACUGACCUGAUGAACUUC |
| | | CUGAAGACCGUGCGGAGCACCACCGAGAAGAGCCUGCU |
| | | GAAGGAGGGC |
| 6 | Human | MAHAMENSWTISKEYHIDEEVGFALPNPQENLPDFYNDWM |
| | IDO1, amino | FIAKHLPDLIESGQLRERVEKLNMLSIDHLTDHKSQRLARLV |
| | acid, Variant | LGCITMAYVWGKGHGDVRKVLPRNIAVPYCQLSKKLELPPI |
| | 3 | LVYADCVLANWKKKDPNKPLTYENMDVLFSFRDGDCSKG |
| | | FFLVSLLVEIAAASAIKVIPTVFKAMQMQERDTLLKALLEIAS |
| | | CLEKALQVFHQIHDHVNPKAFFSVLRIYLSGWKGNPQLSDG |
| | | LVYEGFWEDPKEFAGGSAGQSSVFQCFDVLLGIQQTAGGGH |
| | | AAQFLQDMRRYMPPAHRNFLCSLESNPSVREFVLSKGDAGL |
| | | REAYDACVKALVSLRSYHLQIVTKYILIPASQQPKENKTSED |
| | | PSKLEAKGTGGTDLMNFLKTVRSTTEKSLLKEG |
| 7 | Human | AUGGCACACGCUAUGGAGAACUCCUGGACAAUCAGUAA |
| | IDO1, | AGAGUACCAUAUUGACGAAGAAGUGGGCUUUGCUUUGC |
| | nucleotide, | CAAAUCCACAGGAGAAUCUACCAGAUUUCUAUAACGAC |
| | Variant 3 | UGGAUGUUCAUUGCUAAACAUUUACCAGAUCUCAUAGA |
| | | GUCUGGCCAGCUUCGAGAAAGAGUUGAGAAGUUAAACA |
| | | UGCUCAGCAUUGAUCAUCUCACAGACCACAAGUCACAG |
| | | CGCCUUGCACGUCUAGUUCUGGGAUGCAUCACCAUGGC |
| | | AUAUGUGUGGGGCAAAGGUCAUGGAGAUGUCCGUAAGG |
| | | UCUUGCCAAGAAAUAUUGCUGUUCCUUACUGCCAACUC |
| | | UCCAAGAAACUGGAACUGCCUCCUAUUUUGGUUUAUGC |
| | | AGACUGUGUCUUGGCCAAUUGGAAGAAGAAGGAUCCUA |
| | | AUAAGCCCCUGACUUAUGAGAACAUGGACGUUUUGUUC |
| | | UCAUUUCGUGAUGGAGACUGCAGUAAAGGAUUCUUCCU |
| | | CGUCUCUCUAUUGGUGGAAAUAGCAGCUGCUUCUGCAA |
| | | UCAAAGUAAUUCCUACUGUAUUCAAGGCAAUGCAAAUG |
| | | CAAGAACGGGACACUUUGCUAAAGGCGCUGCUGGAGAU |
| | | CGCUUCUUGCUUGGAGAAAGCCCUUCAAGUGUUUCAUC |
| | | AAAUACAUGAUCAUGUGAACCCUAAGGCAUUCUUCAGU |
| | | GUUCUUCGCAUAUAUUUGUCUGGCUGGAAAGGCAAUCC |
| | | GCAGCUAUCAGACGGUCUGGUGUAUGAAGGCUUCUGGG |
| | | AAGACCCAAAGGAGUUUGCAGGAGGCAGUGCAGGCCAA |
| | | AGCAGCGUCUUUCAGUGCUUUGACGUCCUGCUGGGCAU |
| | | CCAGCAGACUGCUGGUGGAGGACAUGCUGCUCAGUUCC |
| | | UCCAGGACAUGAGAAGAUAUAUGCCACCAGCUCACAGG |
| | | AACUUCCUGUGCUCAUUAGAGUCAAAUCCCUCAGUCCG |
| | | UGAGUUUGUCCUUUCUAAGGGUGAUGCUGGCCUGCGGG |
| | | AAGCUUAUGACGCCUGUGUGAAAGCUCUGGUGUCCCUG |
| | | AGGAGCUACCAUCUGCAAAUCGUGACUAAGUACAUCCU |
| | | GAUUCCUGCAAGCCAGCAGCCUAAGGAGAAUAAGACCU |
| | | CUGAAGACCCUUCAAAGUUGGAGGCAAAGGGCACUGGA |
| | | GGCACUGAUUUAAUGAAUUUCCUGAAGACUGUAAGAAG |
| | | UACAACUGAGAAAUCCCUUUUGAAGGAAGGU |
| 16 | Human IDO | MAHAMENSWTISKEYHIDEEVGFALPNPQENLPDFYNDWM |
| | 1, amino | FIAKHLPDLIESGQLRERVEKLNMLSIDHLTDHKSQRLARLV |
| | acid, variant | LGCITMAYVWGKGHGDVRKVLPRNIAVPYCQLSKKLELPPI |
| | 4 | LVYADCVLANWKKKDPNKPLTYENMDVLFSFRDGDCSKGFF |
| | | LVSLLVEIAAASAIKVIPTVFKAMQMQERDTLLKALLEIAS |
| | | CLEKALQVFHQIHDHVNPKAFFSVLRIYLSGWKGNPQLSDG |
| | Human IDO | LVYEGFWEDPKEFAGGSAGQSSVFQCFDVLLGIQQTAGGGH |
| | 1, nucleotide | AAQFLQDMRRYMPPAHRNFLCSLESNPSVREFVLSKGDAGL |
| | | REAYDACVKALVSLRSYHLQIVTKYILIPASQQPKENKTSE |
| | | DPSKLEAKGTGGTDLMNFLKTVRSTTEKSLLKEGGGGGSGG |
| | | GGSYRLKKISKEEKTPGCVKIKKC |
| 17 | 1, variant 4 | AUGGCCCACGCCAUGGAGAACAGCUGGACCAUCAGCAA |
| | | GGAGUACCACAUCGACGAGGAGGUGGGCUUCGCCCUGC |
| | | CUAACCCUCAGGAGAACCUGCCUGACUUCUACAACGAC |
| | | UGGAUGUUCAUCGCCAAGCAUCUGCCGGACCUGAUCGA |
| | | GAGCGGCCAGCUGAGAGAGAGAGUGGAGAAGCUGAACA |
| | | UGCUGAGCAUCGACCACCUGACCGACCACAAGAGCCAG |
| | | AGACUGGCCAGACUGGUGCUGGGCUGCAUCACCAUGGC |
| | | CUACGUGUGGGGCAAGGGCCACGGCGACGUGAGAAAGG |
| | | UGCUGCCUAGAAACAUCGCCGUGCCUUACUGCCAGCUG |
| | | AGCAAGAAGCUGGAGCUGCCUCCUAUCCUGGUGUACGC |
| | | CGACUGCGUGCUGGCCAACUGGAAGAAGAAGGACCCUA |
| | | ACAAGCCUCUGACCUACGAGAACAUGGACGUGCUGUUC |
| | | AGCUUCAGAGACGGCGACUGCAGCAAGGGCUUCUUCCU |
| | | GGUGAGCCUGCUGGUGGAGAUCGCCGCCGCCAGCGCCA |
| | | UCAAGGUGAUCCCUACCGUGUUCAAGGCCAUGCAGAUG |
| | | CAGGAGAGAGACACCCUGCUGAAGGCCCUGUUGGAAAU |
| | | CGCCAGCUGCCUGGAGAAGGCGCUGCAGGUGUUCCACC |
| | | AGAUCCACGACCACGUGAACCCUAAGGCCUUCUUCAGC |
| | | GUGCUGAGAAUCUACCUGAGCGGCUGGAAGGGCAACCC |
| | | UCAGCUGAGCGACGGACUGGUAUACGAGGGCUUCUGGG |
| | | AGGACCCUAAGGAGUUCGCUGGAGGCUCCGCGGGACAG |
| | | AGCAGCGUGUUCCAGUGCUUCGACGUGCUGCUGGGCAU |
| | | CCAGCAGACCGCUGGUGGCGGACACGCAGCUCAGUUCC |
| | | UGCAGGACAUGAGAAGAUACAUGCCUCCUGCCCACAGA |
| | | AACUUCCUGUGCAGCCUGGAGAGCAACCCUAGCGUGAG |
| | | AGAGUUCGUGCUGAGCAAGGGCGACGCCGGCCUGAGAG |
| | | AGGCCUACGACGCCUGCGUUAAGGCUUUGGUGUCACUG |
| | | AGAAGCUACCACCUGCAGAUCGUGACCAAGUACAUCCU |
| | | GAUCCCUGCCAGCCAGCAGCCUAAGGAGAACAAGACCA |
| | | GCGAGGACCCUAGCAAGCUGGAGGCCAAGGGCACCGGC |
| | | GGCACCGACCUGAUGAACUUCCUGAAGACCGUGAGAAG |
| | | CACCACCGAGAAGAGUCUGCUGAAGGAGGGCGGUGGAG |
| | | GCGGAUCUGGUGGAGGAGGCAGCUACAGACUGAAGAAG |
| | | AUCUCCAAGGAGGAGAAGACCCCUGGCUGCGUGAAGAU |
| | | CAAGAAGUGC |
| 18 | Human IDO | MGSSKSKPKDPSQRRRGGGSAHAMENSWTISKEYHIDEEVG |
| | 1, amino | FALPNPQENLPDFYNDWMFIAKHLPDLIESGQLRERVEKLN |
| | acid, variant | MLSIDHLTDHKSQRLARLVLGCITMAYVWGKGHGDVRKVL |
| | 5 | PRNIAVPYCQLSKKLELPPILVYADCVLANWKKKDPNKPLT |
| | | YENMDVLFSFRDGDCSKGFFLVSLLVEIAAASAIKVIPTVFK |
| | | AMQMQERDTLLKALLEIASCLEKALQVFHQIHDHVNPKAFF |
| | | SVLRIYLSGWKGNPQLSDGLVYEGFWEDPKEFAGGSAGQSS |
| | | VFQCFDVLLGIQQTAGGGHAAQFLQDMRRYMPPAHRNFLC |
| | | SLESNPSVREFVLSKGDAGLREAYDACVKALVSLRSYHLQI |
| | | VTKYILIPASQQPKENKTSEDPSKLEAKGTGGTDLMNFLKTV |
| | | RSTTEKSLLKEG |
| 19 | Human IDO | AUGGGCAGCAGCAAGAGCAAGCCUAAGGACCCUAGCCA |
| | 1, nucleotide | GAGAAGAAGAGGCGGAGGCUCCGCCCACGCCAUGGAGA |
| | 1, variant 5 | ACAGCUGGACCAUCAGCAAGGAGUACCACAUCGACGAG |
| | | GAGGUGGGCUUCGCCCUGCCUAACCCUCAGGAGAACCU |
| | | GCCUGACUUCUACAACGACUGGAUGUUCAUCGCCAAGC |
| | | ACUUGCCGGACCUGAUCGAGAGCGGCCAGCUGAGAGAG |
| | | AGAGUGGAGAAGCUGAACAUGCUGAGCAUCGACCACCU |
| | | GACCGACCACAAGAGCCAGAGACUGGCCAGACUGGUGC |
| | | UGGGCUGCAUCACCAUGGCCUACGUGUGGGGCAAGGGC |
| | | CACGGCGACGUGAGAAAGGUGCUGCCUAGAAACAUCGC |
| | | CGUGCCUUACUGCCAGCUGAGCAAGAAGCUGGAGCUGC |
| | | CUCCUAUCCUGGUGUACGCCGACUGCGUGCUGGCCAAC |
| | | UGGAAGAAGAAGGACCCUAACAAGCCUCUGACCUACGA |
| | | GAACAUGGACGUGCUGUUCAGCUUCAGAGACGGCGACU |
| | | GCAGCAAGGGCUUCUUCCUGGUGAGCCUGCUGGUGGAG |
| | | AUCGCCGCCGCCAGCGCCAUCAAGGUGAUCCCUACCGU |
| | | GUUCAAGGCCAUGCAGAUGCAGGAGAGAGACACCCUGC |
| | | UGAAGGCCCUGUUGGAGAUAGCCAGCUGCCUGGAGAAG |
| | | GCACUGCAGGUGUUCCACCAGAUCCACGACCACGUGAA |
| | | CCCUAAGGCCUUCUUCAGCGUGCUGAGAAUCUACCUGA |
| | | GCGGCUGGAAGGGCAACCCUCAGCUGAGCGACGGCCUG |
| | | GUCUACGAGGGCUUCUGGGAGGACCCUAAGGAGUUCGC |
| | | UGGCGGCUCUGCCGGCCAGAGCAGCGUGUUCCAGUGCU |
| | | UCGACGUGCUGCUGGGCAUCCAACAAACCGCAGGAGGC |
| | | GGCCACGCUGCACAGUUCCUGCAGGACAUGAGAAGAUA |
| | | CAUGCCUCCUGCCCACAGAAACUUCCUGUGCAGCCUGG |
| | | AGAGCAACCCUAGCGUGAGAGAGUUCGUGCUGAGCAAG |
| | | GGCGACGCCGGCCUGAGAGAGGCCUACGACGCCUGCGU |
| | | UAAGGCCCUUGUGUCUCUGAGAAGCUACCACCUGCAGA |
| | | UCGUGACCAAGUACAUCCUGAUCCCUGCCAGCCAGCAG |
| | | CCUAAGGAGAACAAGACCAGCGAGGACCCAAGCAAGCU |
| | | GGAGGCCAAGGGCACCGGCGGCACCGACCUGAUGAACU |
| | | UCCUGAAGACCGUGAGAAGCACCACCGAGAAGUCCCUC |
| | | CUGAAGGAGGGC |
| 8 | Human | MLHFHYYDTSNKIMEPHRPNVKTAVPLSLESYHISEEYGFLL |
| | IDO2, amino | PDSLKELPDHYRPWMEIANKLPQLIDAHQLQAHVDKMPLLS |
| | acid, Variant | CQFLKGHREQRLAHLVLSFLTMGYVWQEGEAQPAEVLPRN |
| | 1 | LALPFVEVSRNLGLPPILVHSDLVLTNWTKKDPDGFLEIGNL |
| | | ETIISFPGGESLHGFILVTALVEKEAVPGIKALVQATNAIL |
| | | QPNQEALLQALQRLRLSIQDITKTLGQMHDYVDPDIFYAGI |
| | | RIFLSGWKDNPAMPAGLMYEGVSQEPLKYSGGSAAQSTVLH |
| | | AFDEFLGIRHSKESGDFLYRMRDYMPPSHKAFIEDIHSAPS |
| | | LRDYILSSGQDHLLTAYNQCVQALAELRSYHITMVTKYLIT |
| | | AAAKAKHGKPNHLPGPPQALKDRGTGGTAVMSFLKSVRDKT |
| | | LESILHPRG |
| 9 | Human | AUGCUCCACUUCCACUACUACGACACCAGCAACAAGAU |
| | IDO2, | CAUGGAGCCUCACAGACCUAACGUGAAGACCGCCGUGC |
| | nucleotide, | CUCUCAGCCUUGAGAGCUACCACAUCAGCGAGGAGUAC |
| | Variant 1 | GGCUUCCUCUUACCAGACAGCUUGAAGGAACUACCGGA |
| | | CCACUACAGACCUUGGAUGGAGAUCGCCAACAAGCUGC |
| | | CUCAGCUGAUCGACGCCCACCAGCUGCAGGCCCACGUG |
| | | GACAAGAUGCCUCUGCUGAGCUGCCAGUUCCUGAAGGG |
| | | CCACAGAGAGCAGAGACUGGCCCACCUGGUCCUCAGCU |
| | | UCCUGACCAUGGGCUACGUGUGGCAGGAGGGCGAGGCC |
| | | CAGCCUGCCGAGGUGCUGCCUAGAAACCUGGCCCUGCC |
| | | UUUCGUGGAGGUGAGCCGGAACCUGGGCCUGCCUCCUA |
| | | UCCUGGUGCACAGCGAUCUUGUCUUGACAAACUGGACC |
| | | AAGAAGGACCCUGACGGAUUCUUGGAGAUAGGCAACCU |
| | | GGAAACAAUCAUUAGCUUCCCUGGCGGCGAGAGCCUGC |
| | | ACGGCUUCAUCCUCGUGACCGCCCUGGUGGAGAAGGAG |
| | | GCAGUACCUGGCAUCAAGGCCCUCGUGCAGGCCACCAA |
| | | CGCCAUCCUGCAGCCUAACCAGGAGGCCCUGCUUCAAG |
| | | CUCUCCAGCGACUCCGCCUGAGCAUCCAGGACAUCACCA |
| | | AGACCCUGGGCCAGAUGCACGACUACGUCGAUCCUGAU |
| | | AUCUUCUACGCCGGCAUCAGAAUCUUCCUGAGCGGCUG |
| | | GAAGGACAACCCUGCCAUGCCUGCCGGCCUGAUGUACG |
| | | AGGGCGUGAGCCAGGAGCCUCUGAAGUACAGCGGCGGC |
| | | AGCGCCGCCCAGAGCACCGUGCUGCACGCCUUCGACGA |
| | | GUUCCUGGGUAUUCGCCACAGCAAGGAGAGCGGCGACU |
| | | UCCUGUACAGAAUGAGAGACUACAUGCCGCCAAGCCAC |
| | | AAGGCCUUCAUCGAGGACAUCCACAGCGCCCCUAGCCU |
| | | CCGGGACUAUAUCCUGAGCAGCGGCCAGGACCACCUGC |
| | | UGACCGCCUACAACCAGUGUGUUCAGGCCCUAGCCGAG |
| | | CUGAGAAGUUAUCACAUUACUAUGGUGACCAAGUACCU |
| | | GAUCACCGCCGCAGCAAAGGCCAAGCACGGCAAGCCAA |
| | | ACCACCUCCCUGGACCUCCUCAGGCGCUCAAGGACAGA |
| | | GGCACCGGCGGCACAGCGGUAAUGAGUUUCCUUAAGAG |
| | | CGUGAGAGAUAAGACCCUAGAGUCCAUCUUGCACCCGC |
| | | GGGGC |
| 10 | Human | MSGCPFLGNNFGYTFKKLPVEGSEEDKSQTGVNRASKGGLI |
| | TDO2, | YGNYLHLEKVLNAQELQSETKGNKIHDEHLFIITHQAYELW |
| | amino acid, | FKQILWELDSVREIFQNGHVRDERNMLKVVSRMHRVSVILK |
| | Variant 1 | LLVQQFSILETMTALDFNDFREYLSPASGFQSLQFRLLENKIG |
| | | VLQNMRVPYNRRHYRDNFKGEENELLLKSEQEKTLLELVE |
| | | AWLERTPGLEPHGFNFWGKLEKNITRGLEEEFIRIQAKEESE |
| | | EKEEQVAEFQKQKEVLLSLFDEKRHEHLLSKGERRLSYRAL |
| | | QGALMIYFYREEPRFQVPFQLLTSLMDIDSLMTKWRYNHVC |
| | | MVHRMLGSKAGTGGSSGYHYLRSTVSDRYKVFVDLFNLST |
| | | YLIPRHWIPKMNPTIHKFLYTAEYCDSSYFSSDESD |
| 11 | Human | AUGAGUGGGUGCCCAUUCUUAGGAAACAACUUUGGAUA |
| | TDO2, | UACUUUUAAGAAACUCCCCGUAGAAGGCAGCGAAGAAG |
| | nucleotide, | ACAAAUCACAAACCGGUGUGAAUAGAGCCAGCAAAGGA |
| | Variant 1 | GGUCUUAUCUACGGGAACUACCUCCAUUUGGAGAAAGU |
| | | UUUGAAUGCACAAGAACUGCAAAGUGAAACCAAGGGAA |
| | | AUAAGAUCCAUGAUGAACAUCUCUUCAUCAUAACUCAU |
| | | CAAGCUUAUGAACUCUGGUUUAAGCAAAUCCUCUGGGA |
| | | GUUGGAUUCUGUUCGAGAGAUCUUUCAGAAUGGCCAUG |
| | | UCAGAGAUGAAAGGAACAUGCUUAAGGUUGUUUCUCGG |
| | | AUGCACCGAGUGUCAGUGAUCCUGAAACUGCUGGUGCA |
| | | GCAGUUUUCCAUUCUGGAGACGAUGACAGCCUUGGACU |
| | | UCAAUGACUUCAGAGAGUACUUAUCUCCAGCAUCAGGC |
| | | UUCCAGAGUUUGCAAUUCCGACUAUUAGAGAACAAGAU |
| | | AGGUGUUCUUCAGAACAUGAGAGUCCCUUAUAACAGAA |
| | | GACAUUAUCGUGAUAACUUCAAAGGAGAAGAGAAUGAA |
| | | CUGCUACUUAAAUCUGAGCAGGAGAAGACACUUCUGGA |
| | | AUUAGUGGAGGCAUGGCUGGAAAGAACUCCAGGUUUAG |
| | | AGCCACAUGGAUUUAACUUCUGGGGAAAGCUUGAGAAG |
| | | AAUAUCACCAGAGGCCUGGAAGAGGAAUUCAUAAGGAU |
| | | UCAGGCUAAAGAAGAGUCUGAAGAGAAAGAGGAACAGG |
| | | UGGCUGAAUUUCAGAAGCAGAAGGAGGUGCUACUGUCC |
| | | UUAUUUGAUGAGAAACGUCACGAACACCUCCUUAGUAA |
| | | AGGUGAAAGACGGCUGUCAUACAGAGCACUUCAGGGAG |
| | | CAUUGAUGAUAUACUUCUACAGGGAGGAGCCUAGGUUC |
| | | CAGGUGCCUUUUCAGUUGCUGACUUCUCUUAUGGACAU |
| | | AGAUUCACUGAUGACCAAAUGGAGAUAUAACCAUGUGU |
| | | GCAUGGUGCACAGAAUGCUGGGCAGCAAAGCUGGCACC |
| | | GGUGGUUCCUCAGGCUAUCACUAUUUACGAUCAACUGU |
| | | GAGUGAUAGGUACAAGGUCUUCGUCGAUCUUUUCAAUC |
| | | UUUCAACAUACCUGAUUCCCCGACACUGGAUACCGAAG |
| | | AUGAACCCAACCAUUCACAAAUUUCUAUAUACAGCAGA |
| | | AUACUGUGAUAGCUCCUACUUCAGCAGUGAUGAAUCAG |
| | | AU |
| 12 | Human | MGSSKSKPKDPSQRRRGGGSSGCPFLGNNFGYTFKKLPVEG |
| | TDO2, | SEEDKSQTGVNRASKGGLIYGNYLHLEKVLNAQELQSETKG |
| | amino acid, | NKIHDEHLFIITHQAYELWFKQILWELDSVREIFQNGHVRDE |
| | Variant 2 | RNMLKVVSRMHRVSVILKLLVQQFSILETMTALDENDFREY |
| | | LSPASGFQSLQFRLLENKIGVLQNMRVPYNRRHYRDNFKGE |
| | | ENELLLKSEQEKTLLELVEAWLERTPGLEPHGFNFWGKLEK |
| | | NITRGLEEEFIRIQAKEESEEKEEQVAEFQKQKEVLLSLFD |
| | | EKRHEHLLSKGERRLSYRALQGALMIYFYREEPRFQVPFQL |
| | | LTSLMDIDSLMTKWRYNHVCMVHRMLGSKAGTGGSSGYHYL |
| | | RSTVSDRYKVFVDLFNLSTYLIPRHWIPKMNPTIHKFLYTA |
| | | EYCDSSYFSSDESDGGKPIPNPLLGLDST |
| 13 | Human | AUGGGCAGCAGCAAGAGCAAGCCUAAGGACCCUAGCCA |
| | TDO2, | GAGAAGAAGAGGCGGCGGCUCAUCCGGCUGCCCUUUCC |
| | nucleotide 1, | UGGGCAACAACUUCGGCUACACCUUCAAGAAGCUGCCU |
| | Variant 2 | GUGGAGGGCAGCGAGGAGGACAAGAGCCAGACCGGCGU |
| | | GAACAGAGCCAGCAAGGGCGGCCUGAUCUACGGCAACU |
| | | ACCUGCACCUGGAGAAGGUGCUGAACGCCCAGGAGCUG |
| | | CAGAGCGAAACUAAGGGUAACAAGAUCCACGACGAGCA |
| | | CCUGUUCAUCAUCACCCACCAGGCCUACGAGCUGUGGU |
| | | UCAAGCAGAUCCUGUGGGAGCUGGACAGCGUGAGAGAG |
| | | AUCUUCCAGAACGGCCACGUCAGGGACGAGAGAAACAU |
| | | GCUGAAGGUGGUGAGCAGAAUGCACAGAGUGAGCGUGA |
| | | UCCUGAAGCUGCUGGUGCAGCAGUUCAGCAUCCUGGAA |
| | | ACAAUGACCGCCCUGGACUUCAACGACUUCAGAGAGUA |
| | | CCUGAGCCCUGCCAGCGGCUUCCAGAGCCUUCAGUUCA |
| | | GACUGCUGGAGAAUAAGAUCGGCGUGCUGCAGAACAUG |
| | | AGAGUGCCUUACAACAGAAGACACUACAGAGACAACUU |
| | | CAAGGGCGAGGAGAACGAGCUGCUGCUCAAGAGCGAGC |
| | | AGGAGAAGACCCUCUUGGAACUGGUGGAGGCCUGGCUG |
| | | GAGAGAACCCCUGGCCUGGAGCCUCACGGCUUCAACUU |
| | | CUGGGGCAAGCUUGAGAAGAACAUCACCAGAGGACUCG |
| | | AAGAGGAGUUCAUCAGAAUCCAGGCCAAGGAGGAGUCA |
| | | GAGGAGAAGGAGGAACAGGUGGCCGAGUUCCAGAAGCA |
| | | GAAGGAAGUGCUGCUAAGCCUGUUCGACGAGAAGAGAC |
| | | ACGAACACCUGCUGUCGAAGGGAGAAAGAAGACUGAGC |
| | | UACCGUGCUUUGCAGGGCGCCCUGAUGAUCUACUUCUA |
| | | CAGGGAGGAGCCUAGAUUCCAGGUGCCUUUCCAGCUGC |
| | | UGACCAGCCUGAUGGACAUCGACUCUUUGAUGACCAAG |
| | | UGGAGAUACAACCACGUGUGCAUGGUGCACAGAAUGCU |
| | | CGGCUCCAAGGCCGGCACCGGUGGUAGCUCCGGAUACC |
| | | ACUACCUGAGAAGCACCGUGAGCGACAGAUACAAGGUG |
| | | UUCGUGGACCUCUUCAACCUCAGCACCUACCUGAUCCC |
| | | UAGACACUGGAUCCCUAAGAUGAACCCUACCAUCCACA |
| | | AGUUCCUGUACACCGCCGAGUACUGCGACAGCAGCUAC |
| | | UUCAGCAGCGACGAGAGCGACGGCGGCAAGCCUAUCCC |
| | | UAACCCUCUGCUGGGCCUGGACAGCACC |
| 14 | Human | AUGGGCAGCAGCAAGUCCAAGCCCAAGGACCCUUCCCA |
| | TDO2, | GAGAAGGAGGGGUGGCGGCUCUAGCGGCUGCCCCUUCC |
| | nucleotide 2, | UGGGCAACAACUUCGGCUACACCUUCAAGAAGCUGCCC |
| | Variant 2 | GUGGAGGGCAGCGAGGAGGACAAGUCCCAGACCGGCGU |
| | | GAACCGGGCCAGCAAGGGUGGCCUGAUCUACGGCAACU |
| | | ACCUGCACCUGGAGAAGGUGCUGAACGCCCAGGAGCUG |
| | | CAGUCCGAGACCAAGGGCAAUAAGAUCCACGACGAGCA |
| | | CCUGUUCAUCAUCACCCACCAGGCCUACGAGCUGUGGU |
| | | UCAAGCAGAUCCUGUGGGAGCUGGAUAGCGUGAGGGAG |
| | | AUCUUCCAGAACGGCCACGUGCGGGACGAGCGCAACAU |
| | | GCUGAAGGUGGUGAGCCGGAUGCACCGGGUGUCCGUGA |
| | | UCCUGAAGCUGCUGGUGCAGCAGUUCAGUAUCCUGGAG |
| | | ACCAUGACCGCCCUGGACUUCAACGACUUCCGGGAGUA |
| | | CCUGAGCCCAGCCUCCGGGUUCCAGUCCCUGCAGUUCA |
| | | GACUGCUGGAGAACAAGAUCGGGGUGCUGCAGAACAUG |
| | | CGGGUGCCUUACAACCGGCGGCACUACCGGGACAACUU |
| | | CAAGGGCGAGGAGAACGAGCUGCUGCUGAAGUCCGAGC |
| | | AGGAGAAGACCCUGCUGGAGCUGGUGGAGGCCUGGCUG |
| | | GAGCGGACACCCGGGCUGGAGCCACACGGGUUCAACUU |
| | | CUGGGGCAAGCUGGAGAAGAACAUCACCAGAGGCCUGG |
| | | AGGAGGAGUUCAUCCGCAUCCAGGCCAAGGAAGAGUCC |
| | | GAGGAGAAGGAGGAGCAGGUGGCCGAGUUCCAGAAGCA |
| | | GAAGGAGGUGCUGCUGAGCCUGUUCGACGAGAAGAGGC |
| | | ACGAGCACCUGCUGUCCAAGGGCGAGAGGCGGCUGAGC |
| | | UACAGAGCCCUACAGGGCGCCCUGAUGAUCUACUUCUA |
| | | CAGGGAGGAGCCCCGCUUCCAGGUGCCCUUCCAGCUGC |
| | | UGACCAGCCUGAUGGACAUCGACAGCCUGAUGACCAAG |
| | | UGGCGGUACAACCACGUGUGCAUGGUGCACCGGAUGCU |
| | | GGGCUCCAAAGCCGGAACGGGCGGCAGUUCCGGCUACC |
| | | ACUACCUGCGGAGCACCGUGUCCGACCGGUACAAGGUG |
| | | UUCGUGGACCUGUUCAACCUGAGCACCUACCUGAUCCC |
| | | UCGGCACUGGAUCCCUAAGAUGAACCCCACCAUCCACA |
| | | AGUUCCUGUACACCGCCGAGUACUGCGACAGCAGCUAC |
| | | UUCUCCUCCGACGAGUCCGACGGCGGAAAGCCCAUCCCC |
| | | AAUCCCCUGCUGGGCCUGGACUCCACC |
| 15 | Human | AUGGGAUCUUCUAAAUCUAAACCUAAAGAUCCUUCUCA |
| | TDO2, | AAGAAGAAGAGGAGGAGGAUCUUCUGGAUGUCCUUUUC |
| | nucleotide 3, | UUGGAAAUAAUUUUGGAUAUACAUUUAAGAAACUUCCU |
| | Variant 2 | GUUGAAGGAUCUGAAGAAGACAAGUCCCAGACCGGCGU |
| | | GAACCGGGCCAGCAAGGGUGGCCUGAUCUACGGCAACU |
| | | ACCUGCACCUGGAGAAGGUGCUGAACGCCCAGGAGCUG |
| | | CAGUCCGAGACCAAGGGCAAUAAGAUCCACGACGAGCA |
| | | CCUGUUCAUCAUCACCCACCAGGCCUACGAGCUGUGGU |
| | | UCAAGCAGAUCCUGUGGGAGCUGGAUAGCGUGAGGGAG |
| | | AUCUUCCAGAACGGCCACGUGCGGGACGAGCGCAACAU |
| | | GCUGAAGGUGGUGAGCCGGAUGCACCGGGUGUCCGUGA |
| | | UCCUGAAGCUGCUGGUGCAGCAGUUCAGUAUCCUGGAG |
| | | ACCAUGACCGCCCUGGACUUCAACGACUUCCGGGAGUA |
| | | CCUGAGCCCAGCCUCCGGGUUCCAGUCCCUGCAGUUCA |
| | | GACUGCUGGAGAACAAGAUCGGGGUGCUGCAGAACAUG |
| | | CGGGUGCCUUACAACCGGCGGCACUACCGGGACAACUU |
| | | CAAGGGCGAGGAGAACGAGCUGCUGCUGAAGUCCGAGC |
| | | AGGAGAAGACCCUGCUGGAGCUGGUGGAGGCCUGGCUG |
| | | GAGCGGACACCCGGGCUGGAGCCACACGGGUUCAACUU |
| | | CUGGGGCAAGCUGGAGAAGAACAUCACCAGAGGCCUGG |
| | | AGGAGGAGUUCAUCCGCAUCCAGGCCAAGGAAGAGUCC |
| | | GAGGAGAAGGAGGAGCAGGUGGCCGAGUUCCAGAAGCA |
| | | GAAGGAGGUGCUGCUGAGCCUGUUCGACGAGAAGAGGC |
| | | ACGAGCACCUGCUGUCCAAGGGCGAGAGGCGGCUGAGC |
| | | UACAGAGCCCUACAGGGCGCCCUGAUGAUCUACUUCUA |
| | | CAGGGAGGAGCCCCGCUUCCAGGUGCCCUUCCAGCUGC |
| | | UGACCAGCCUGAUGGACAUCGACAGCCUGAUGACCAAG |
| | | UGGCGGUACAACCACGUGUGCAUGGUGCACCGGAUGCU |
| | | GGGCUCCAAAGCCGGAACGGGCGGCAGUUCCGGCUACC |
| | | ACUACCUGCGGAGCACCGUGUCCGACCGGUACAAGGUG |
| | | UUCGUGGACCUGUUCAACCUGAGCACCUACCUGAUCCC |
| | | UCGGCACUGGAUCCCUAAGAUGAACCCCACCAUCCACA |
| | | AGUUCCUGUACACCGCCGAGUACUGCGACAGCAGCUAC |
| | | UUCUCCUCCGACGAGUCCGACGGCGGAAAGCCCAUCCCC |
| | | AAUCCCCUGCUGGGCCUGGACUCCACC |
| 20 | Human | MSGCPFLGNNFGYTFKKLPVEGSEEDKSQTGVNRASKGGLI |
| | TDO2, | YGNYLHLEKVLNAQELQSETKGNKIHDEHLFIITHQAYELW |
| | amino acid, | FKQILWELDSVREIFQNGHVRDERNMLKVVSRMHRVSVILK |
| | variant 3 | LLVQQFSILETMTALDFNDFREYLSPASGFQSLQFRLLENK |
| | | IGVLQNMRVPYNRRHYRDNFKGEENELLLKSEQEKTLLELV |
| | | EAWLERTPGLEPHGFNFWGKLEKNITRGLEEEFIRIQAKEE |
| | | SEEKEEQVAEFQKQKEVLLSLFDEKRHEHLLSKGERRLSYR |
| | | ALQGALMIYFYREEPRFQVPFQLLTSLMDIDSLMTKWRYNH |
| | | VCMVHRMLGSKAGTGGSSGYHYLRSTVSDRYKVFVDLFNLS |
| | | TYLIPRHWIPKMNPTIHKFLYTAEYCDSSYFSSDESDGGGG |
| | | GSGGGGSYRLKKISKEEKTPGCVKIKKC |
| 21 | Human | AUGAGCGGCUGCCCCUUCCUCGGCAACAACUUCGGCUA |
| | TDO2, | CACCUUCAAGAAGCUGCCCGUGGAGGGCAGCGAGGAGG |
| | nucleotide 1, | ACAAGAGCCAGACCGGCGUGAACCGGGCCAGCAAGGGA |
| | variant 3 | GGCCUGAUCUACGGCAACUACCUGCACCUGGAGAAGGU |
| | | GCUGAACGCCCAGGAGCUGCAGAGCGAGACCAAGGGCA |
| | | ACAAGAUCCACGACGAGCACCUGUUCAUCAUCACCCAC |
| | | CAGGCCUACGAGCUGUGGUUCAAGCAGAUCCUGUGGGA |
| | | GCUGGACAGCGUGCGGGAGAUCUUCCAGAACGGCCACG |
| | | UGCGGGACGAGCGGAACAUGCUGAAGGUGGUGAGCCGG |
| | | AUGCACCGGGUGAGCGUGAUCCUGAAGCUGCUGGUGCA |
| | | GCAGUUCAGCAUCCUGGAGACCAUGACCGCCCUGGACU |
| | | UCAACGACUUCCGGGAGUACUUAAGCCCCGCCUCCGGC |
| | | UUUCAGAGCCUGCAGUUCCGGCUGCUGGAGAACAAGAU |
| | | CGGCGUGCUGCAGAACAUGCGGGUGCCCUACAACCGGC |
| | | GGCACUACCGGGACAACUUCAAGGGCGAGGAGAACGAG |
| | | CUGCUGCUAAAGAGCGAGCAGGAGAAGACCCUGCUGGA |
| | | GCUGGUGGAGGCCUGGCUGGAGCGGACACCCGGCCUGG |
| | | AACCCCACGGCUUCAACUUCUGGGGCAAGCUGGAGAAG |
| | | AACAUCACCCGGGGACUGGAGGAGGAGUUCAUCCGGAU |
| | | CCAGGCCAAGGAGGAGAGCGAAGAGAAGGAGGAGCAGG |
| | | UGGCCGAGUUCCAGAAGCAGAAGGAGGUGCUGCUGAGC |
| | | CUGUUCGACGAGAAGCGGCACGAGCAUCUUCUGUCGAA |
| | | GGGCGAACGGCGGCUGAGCUAUCGGGCCCUGCAAGGAG |
| | | CCCUGAUGAUCUACUUCUACCGGGAGGAGCCCCGGUUC |
| | | CAGGUGCCCUUCCAGCUGCUGACCAGCCUGAUGGACAU |
| | | CGAUAGCCUGAUGACCAAGUGGCGGUACAACCACGUGU |
| | | GCAUGGUGCACCGGAUGCUGGGCAGCAAGGCCGGCACC |
| | | GGAGGAAGCAGCGGCUACCACUACCUGCGGAGCACCGU |
| | | GAGCGACCGGUACAAGGUGUUCGUGGACCUGUUCAACC |
| | | UGAGCACCUACCUGAUUCCCCGGCACUGGAUCCCCAAG |
| | | AUGAACCCCACCAUCCACAAGUUCCUGUACACCGCCGA |
| | | GUACUGCGACAGCAGCUACUUCAGCAGCGACGAAUCAG |
| | | ACGGCGGCGGUGGAGGAUCAGGAGGCGGCGGAAGCUAC |
| | | CGGCUGAAGAAGAUCAGCAAGGAAGAGAAGACUCCCGG |
| | | CUGCGUGAAGAUCAAGAAGUGC |
| 22 | Human | MGSSKSKPKDPSQRRRGGGSSGCPFLGNNFGYTFKKLPVEG |
| | TDO2, | SEEDKSQTGVNRASKGGLIYGNYLHLEKVLNAQELQSETKG |
| | amino acid, | NKIHDEHLFIITHQAYELWFKQILWELDSVREIFQNGHVRDE |
| | variant 4 | RNMLKVVSRMHRVSVILKLLVQQFSILETMTALDENDFREY |
| | | LSPASGFQSLQFRLLENKIGVLQNMRVPYNRRHYRDNFKGE |
| | | ENELLLKSEQEKTLLELVEAWLERTPGLEPHGFNFWGKLEK |
| | | NITRGLEEEFIRIQAKEESEEKEEQVAEFQKQKEVLLSLFD |
| | | EKRHEHLLSKGERRLSYRALQGALMIYFYREEPRFQVPFQL |
| | | LTSLMDIDSLMTKWRYNHVCMVHRMLGSKAGTGGSSGYHYL |
| | | RSTVSDRYKVFVDLFNLSTYLIPRHWIPKMNPTIHKFLYTA |
| | | EYCDSSYFSSDESDG |
| 23 | Human | AUGGGCAGCAGCAAGAGCAAGCCUAAGGACCCUAGCCA |
| | TDO2, | GAGAAGAAGAGGCGGAGGCUCCAGCGGCUGCCCCUUCC |
| | nucleotide 1, | UCGGCAACAACUUCGGCUACACCUUCAAGAAGCUGCCC |
| | variant 4 | GUGGAGGGCAGCGAGGAGGACAAGAGCCAGACCGGCGU |
| | | GAACCGGGCCAGCAAGGGAGGCCUGAUCUACGGCAACU |
| | | ACCUGCACCUGGAGAAGGUGCUGAACGCCCAGGAGCUG |
| | | CAGAGCGAGACCAAGGGCAACAAGAUCCACGACGAGCA |
| | | CCUGUUCAUCAUCACCCACCAGGCCUACGAGCUGUGGU |
| | | UCAAGCAGAUCCUGUGGGAGCUGGACAGCGUGCGGGAG |
| | | AUCUUCCAGAACGGCCACGUGCGGGACGAGCGGAACAU |
| | | GCUGAAGGUGGUGAGCCGGAUGCACCGGGUGAGCGUGA |
| | | UCCUGAAGCUGCUGGUGCAGCAGUUCAGCAUCCUGGAG |
| | | ACCAUGACCGCCCUGGACUUCAACGACUUCCGGGAGUA |
| | | CUUAAGCCCCGCCUCCGGCUUUCAGAGCCUGCAGUUCC |
| | | GGCUGCUGGAGAACAAGAUCGGCGUGCUGCAGAACAUG |
| | | CGGGUGCCCUACAACCGGCGGCACUACCGGGACAACUU |
| | | CAAGGGCGAGGAGAACGAGCUGCUGCUAAAGAGCGAGC |
| | | AGGAGAAGACCCUGCUGGAGCUGGUGGAGGCCUGGCUG |
| | | GAGCGGACACCCGGCCUGGAACCCCACGGCUUCAACUU |
| | | CUGGGGCAAGCUGGAGAAGAACAUCACCCGGGGACUGG |
| | | AGGAGGAGUUCAUCCGGAUCCAGGCCAAGGAGGAGAGC |
| | | GAAGAGAAGGAGGAGCAGGUGGCCGAGUUCCAGAAGCA |
| | | GAAGGAGGUGCUGCUGAGCCUGUUCGACGAGAAGCGGC |
| | | ACGAGCAUCUUCUGUCGAAGGGCGAACGGCGGCUGAGC |
| | | UAUCGGGCCCUGCAAGGAGCCCUGAUGAUCUACUUCUA |
| | | CCGGGAGGAGCCCCGGUUCCAGGUGCCCUUCCAGCUGC |
| | | UGACCAGCCUGAUGGACAUCGAUAGCCUGAUGACCAAG |
| | | UGGCGGUACAACCACGUGUGCAUGGUGCACCGGAUGCU |
| | | GGGCAGCAAGGCCGGCACCGGAGGAAGCAGCGGCUACC |
| | | ACUACCUGCGGAGCACCGUGAGCGACCGGUACAAGGUG |
| | | UUCGUGGACCUGUUCAACCUGAGCACCUACCUGAUUCC |
| | | CCGGCACUGGAUCCCCAAGAUGAACCCCACCAUCCACA |
| | | AGUUCCUGUACACCGCCGAGUACUGCGACAGCAGCUAC |
| | | UUCAGCAGCGACGAAUCAGACGGC |
| 25 | Hs AMPKG2 | MGSAVMDTKKKKDVSSPGGSGGKKNASQKRRSLRVHIPDLS |
| | (T400N) AA | SFAMPLLDGDLEGSGKHSSRKVDSPFGPGSPSKGFFSRGPQ |
| | | PRPSSPMSAPVRPKTSPGSPKTVFPFSYQESPPRSPRRMSF |
| | | SGIFRSSSKESSPNSNPATSPGGIRFFSRSRKTSGLSSSPS |
| | | TPTQVTKQHTFPLESYKHEPERLENRIYASSSPPDTGQRFC |
| | | PSSFQSPTRPPLASPTHYAPSKAAALAAALGPAEAGMLEKL |
| | | EFEDEAVEDSESGVYMRFMRSHKCYDIVPTSSKLVVFDTTL |
| | | QVKKAFFALVANGVRAAPLWESKKQSFVGMLTITDFINILH |
| | | RYYKSPMVQIYELEEHKIETWRELYLQETFKPLVNISPDAS |
| | | LFDAVYSLIKNKIHRLPVIDPISGNALYILNHKRILKFLQL |
| | | FMSDMPKPAFMKQNLDELGIGTYHNIAFIHPDTPIIKALNI |
| | | FVERRISALPVVDESGKVVDIYSKFDVINLAAEKTYNNLDI |
| | | TVTQALQHRSQYFEGVVKCNKLEILETIVDRIVRAEVHRLV |
| | | VVNEADSIVGIISLSDILQALILTPAGAKQKETETE |
| 26 | Hs AMPKG2 | AUGGGCAGCGCCGUGAUGGACACCAAGAAGAAGAAGGA |
| | (T400N) NT | CGUGAGCAGCCCAGGCGGCAGCGGCGGAAAGAAGAACG |
| | | CCAGCCAGAAGAGAAGAAGCCUCAGAGUGCACAUCCCA |
| | | GACCUUAGCAGCUUCGCCAUGCCUCUUUUAGACGGCGA |
| | | CCUGGAGGGCUCUGGUAAGCACAGCAGCAGAAAGGUGG |
| | | ACAGCCCUUUCGGCCCUGGCAGCCCUAGCAAGGGCUUC |
| | | UUCAGCAGAGGCCCUCAGCCUAGACCUUCUUCCCCUAU |
| | | GAGCGCCCCUGUGCGACCUAAGACUAGUCCAGGAUCCC |
| | | CAAAGACCGUGUUCCCUUUCAGCUACCAGGAGAGCCCU |
| | | CCUAGAAGCCCUAGAAGAAUGAGCUUCAGCGGCAUCUU |
| | | CAGAAGCAGCAGCAAGGAAUCCAGUCCAAACAGCAACC |
| | | CUGCCACAAGCCCGGGCGGCAUCAGAUUCUUCUCCAGG |
| | | UCAAGAAAGACCUCCGGCUUGUCGUCAUCUCCUUCAAC |
| | | CCCUACCCAGGUGACCAAGCAGCACACCUUCCCUCUGGA |
| | | GAGCUACAAGCACGAGCCAGAAAGACUGGAGAACAGAA |
| | | UCUACGCCAGCUCCUCACCACCUGACACCGGCCAGAGAU |
| | | UCUGUCCAUCAAGCUUCCAGAGCCCUACCAGACCUCCUC |
| | | UGGCCUCCCCGACCCACUACGCCCCAAGCAAGGCCGCCG |
| | | CACUAGCUGCGGCGUUGGGCCCUGCCGAGGCCGGCAUG |
| | | CUGGAGAAGCUGGAGUUCGAGGACGAGGCCGUGGAGGA |
| | | CAGCGAGAGCGGCGUGUACAUGAGAUUCAUGAGAAGCC |
| | | ACAAGUGCUACGACAUCGUGCCUACAUCAUCAAAGCUG |
| | | GUGGUGUUCGACACCACCCUGCAGGUGAAGAAGGCCUU |
| | | CUUCGCCCUGGUGGCCAACGGCGUGAGAGCCGCCCCUC |
| | | UGUGGGAGAGCAAGAAGCAGAGCUUCGUGGGUAUGCUU |
| | | ACCAUCACCGACUUCAUCAACAUCCUGCACAGAUACUA |
| | | CAAGAGUCCAAUGGUGCAGAUCUACGAGCUGGAGGAGC |
| | | ACAAGAUCGAGACAUGGAGAGAGCUGUACCUGCAGGAA |
| | | ACAUUCAAGCCUCUGGUGAACAUCAGCCCUGAUGCCAG |
| | | CCUGUUCGACGCCGUGUACAGCCUGAUCAAGAACAAGA |
| | | UCCACAGACUGCCUGUGAUCGACCCUAUCUCUGGAAAC |
| | | GCCCUGUACAUCCUGAACCACAAGAGAAUCCUGAAGUU |
| | | CCUGCAGCUGUUCAUGAGCGACAUGCCUAAGCCUGCCU |
| | | UCAUGAAGCAGAACCUGGAUGAACUUGGCAUCGGCACC |
| | | UACCACAACAUCGCCUUCAUCCACCCAGACACUCCUAUC |
| | | AUCAAGGCCCUGAACAUCUUCGUGGAGCGCCGCAUCAG |
| | | CGCCCUCCCGGUCGUGGAUGAGAGCGGAAAGGUCGUUG |
| | | ACAUCUACAGCAAGUUCGACGUGAUCAAUCUCGCCGCC |
| | | GAGAAGACCUACAACAACCUAGAUAUCACCGUGACCCA |
| | | GGCCCUGCAGCACAGAAGCCAGUACUUCGAGGGCGUGG |
| | | UGAAGUGCAACAAGCUUGAGAUCCUGGAAACAAUCGUG |
| | | GACAGAAUUGUACGGGCAGAGGUGCACCGUCUUGUAGU |
| | | UGUGAAUGAGGCAGACAGCAUCGUCGGCAUCAUCAGCC |
| | | UUAGUGACAUCCUUCAGGCGUUGAUCCUGACCCCUGCC |
| | | GGCGCCAAGCAGAAGGAAACUGAAACCGAG |
| 27 | Hs HMOX1 | MERPQPDSMPQDLSEALKEATKEVHTQAENAEFMRNFQKG |
| | AA | QVTRDGFKLVMASLYHIYVALEEEIERNKESPVFAPVYFP |
| | | EELHRKAALEQDLAFWYGPRWQEVIPYTPAMQRYVKRLHEV |
| | | GRTEPELLVAHAYTRYLGDLSGGQVLKKIAQKALDLPSSGE |
| | | GLAFFTFPNIASATKFKQLYRSRMNSLEMTPAVRQRVIEEA |
| | | KTAFLLNIQLFEELQELLTHDTKDQSPSRAPGLRQRASNKV |
| | | QDSAPVETPRGKPPLNTRSQAPLLRWVLTLSFLVATVAVGL |
| | | YAM |
| 28 | Hs HMOX1 | AUGGAGCGUCCGCAACCCGACAGCAUGCCCCAGGAUUU |
| | NT | GUCAGAGGCCUUGAAGGAGGCCACCAAGGAGGUGCACA |
| | | CCCAGGCAGAGAACGCCGAGUUCAUGAGGAACUUUCAG |
| | | AAGGGCCAGGUGACCCGAGACGGCUUCAAGCUCGUGAU |
| | | GGCCUCCCUGUACCACAUCUAUGUGGCCCUGGAGGAGG |
| | | AGAUUGAGCGCAACAAGGAGAGCCCAGUCUUCGCCCCU |
| | | GUCUACUUCCCAGAGGAACUGCACCGCAAGGCUGCACU |
| | | AGAACAGGACCUGGCCUUCUGGUACGGGCCCCGCUGGC |
| | | AGGAGGUCAUCCCCUACACACCAGCCAUGCAGCGCUAU |
| | | GUGAAGCGGCUCCACGAGGUGGGGCGCACAGAGCCCGA |
| | | GCUGCUGGUGGCCCACGCCUACACCCGCUACCUGGGUG |
| | | ACCUGUCUGGUGGACAAGUUCUCAAGAAGAUUGCCCAG |
| | | AAAGCCCUGGACCUGCCCAGCUCUGGCGAGGGACUGGC |
| | | AUUCUUCACCUUCCCCAACAUUGCCAGUGCUACAAAGU |
| | | UCAAGCAGCUCUACCGCUCCCGCAUGAACUCCCUGGAG |
| | | AUGACUCCCGCAGUGAGACAAAGGGUGAUAGAAGAGGC |
| | | CAAGACUGCGUUCCUGCUCAACAUCCAGCUCUUUGAGG |
| | | AGUUGCAGGAGCUGUUGACCCAUGACACAAAGGACCAG |
| | | AGCCCCUCACGGGCACCAGGGCUUCGCCAGCGGGCCAGC |
| | | AACAAAGUGCAAGAUUCUGCUCCGGUGGAGACUCCCAG |
| | | AGGGAAGCCUCCACUCAACACCCGGUCCCAGGCUCCGCU |
| | | UCUCCGAUGGGUCCUUACACUCAGCUUUCUGGUGGCGA |
| | | CAGUUGCUGUAGGGCUUUAUGCCAUG |
| 29 | Hs | MTSSKIEMPGEVKADPAALMASLHLLPSPTPNLEIKYTKIF |
| | ALDH1A2 | INNEWQNSESGRVFPVYNPATGEQVCEVQEADKADIDKAVQ |
| | AA | AARLAFSLGSVWRRMDASERGRLLDKLADLVERDRAVLATM |
| | (affinity tag | ESLNGGKPFLQAFYVDLQGVIKTFRYYAGWADKIHGMTIPV |
| | italicized and | DGDYFTFTRHEPIGVCGQIIPWNFPLLMFAWKIAPALCCGN |
| | underlined) | TVVIKPAEQTPLSALYMGALIKEAGFPPGVINILPGYGPTA |
| | | GAAIASHIGIDKIAFTGSTEVGKLIQEAAGRSNLKRVTLEL |
| | | GGKSPNIIFADADLDYAVEQAHQGVFFNQGQCCTAGSRIFV |
| | | EESIYEEFVRRSVERAKRRVVGSPFDPTTEQGPQIDKKQYN |
| | | KILELIQSGVAEGAKLECGGKGLGRKGFFIEPTVFSNVTDD |
| | | MRIAKEEIFGPVQEILRFKTMDEVIERANNSDFGLVAAVFT |
| | | NDINKALTVSSAMQAGTVWINCYNALNAQSPFGGFKMSGNG |
| | | REMGEFGLREYSEVKTVTVKIPQKNSGKPIPNPLLGLDST |
| 30 | Hs | AUGACCAGCAGCAAGAUCGAGAUGCCUGGCGAGGUGAA |
| | ALDH1A2 | GGCCGACCCUGCCGCCCUGAUGGCCAGCCUGCACCUGCU |
| | NT | GCCUAGCCCUACCCCUAACCUGGAGAUCAAGUACACCA |
| | | AGAUCUUCAUCAACAACGAGUGGCAGAACAGCGAGAGC |
| | | GGCAGAGUGUUCCCUGUGUACAACCCUGCCACCGGCGA |
| | | GCAGGUGUGCGAGGUGCAGGAGGCCGACAAGGCCGACA |
| | | UAGACAAGGCUGUGCAGGCCGCCAGACUGGCCUUCAGC |
| | | CUGGGCAGCGUGUGGAGAAGAAUGGACGCCAGCGAGAG |
| | | AGGCAGACUGCUGGACAAGCUGGCCGACCUGGUGGAGA |
| | | GAGACAGAGCCGUGCUGGCCACCAUGGAGAGCCUGAAC |
| | | GGCGGCAAGCCUUUCCUGCAGGCCUUCUACGUGGACCU |
| | | GCAGGGCGUGAUCAAGACCUUCAGAUACUACGCCGGCU |
| | | GGGCAGACAAGAUCCACGGCAUGACCAUCCCUGUGGAC |
| | | GGCGACUACUUCACCUUCACCAGACACGAGCCUAUCGG |
| | | CGUGUGCGGCCAGAUCAUCCCUUGGAACUUCCCUCUGC |
| | | UGAUGUUCGCCUGGAAGAUCGCCCCUGCCCUGUGCUGC |
| | | GGCAACACCGUGGUGAUCAAGCCUGCCGAGCAGACCCC |
| | | UCUGAGCGCCCUGUACAUGGGCGCCCUGAUCAAGGAGG |
| | | CCGGCUUCCCUCCUGGCGUGAUUAACAUCCUGCCUGGC |
| | | UACGGACCAACUGCCGGAGCUGCGAUCGCCAGCCACAU |
| | | CGGCAUCGAUAAGAUCGCCUUCACCGGCAGCACCGAGG |
| | | UGGGCAAGCUGAUCCAAGAGGCUGCCGGCAGAAGCAAC |
| | | CUGAAGAGAGUGACCCUGGAGCUGGGCGGCAAGAGCCC |
| | | UAACAUCAUCUUCGCCGACGCUGAUCUGGACUACGCCG |
| | | UGGAGCAGGCCCACCAGGGCGUGUUCUUCAACCAGGGC |
| | | CAGUGCUGCACAGCCGGCAGCAGAAUCUUCGUGGAGGA |
| | | GAGCAUCUACGAGGAGUUCGUGAGAAGAAGCGUUGAAA |
| | | GAGCCAAGAGAAGAGUGGUGGGCAGCCCUUUCGACCCU |
| | | ACCACCGAGCAGGGCCCUCAGAUAGAUAAGAAGCAGUA |
| | | CAACAAGAUUCUGGAACUGAUCCAGAGUGGUGUGGCAG |
| | | AAGGCGCCAAGCUGGAGUGUGGCGGCAAGGGAUUAGGA |
| | | AGAAAGGGCUUCUUCAUCGAGCCUACCGUGUUCAGCAA |
| | | CGUGACCGACGACAUGAGAAUCGCCAAGGAGGAGAUCU |
| | | UCGGCCCUGUGCAGGAGAUCCUGAGAUUCAAGACCAUG |
| | | GACGAGGUGAUCGAGCGUGCUAACAACAGCGACUUCGG |
| | | CCUGGUGGCCGCCGUGUUCACCAACGACAUCAACAAGG |
| | | CCCUGACCGUGAGCAGCGCCAUGCAGGCCGGCACCGUG |
| | | UGGAUCAACUGCUACAACGCCCUGAACGCCCAGAGUCC |
| | | AUUCGGCGGCUUCAAGAUGAGCGGCAACGGCAGAGAGA |
| | | UGGGCGAGUUCGGCCUGAGAGAGUACAGUGAGGUGAAG |
| | | ACCGUGACCGUGAAGAUCCCUCAGAAGAACUCCGGAAA |
| | | GCCUAUCCCUAACCCACUCCUGGGCCUGGACAGCACC |
| 31 | Hs AhR | MNSSSANITYASRKRRKPVQKTVKPIPAEGIKSNPSKRHRDR |
| | constitutively | LNTELDRLASLLPFPQDVINKLDKLSVLRLSVSYLRAKSFFD |
| | active AA | VALKSSPTERNGGQDNCRAANFREGLNLQEGEFLLQALNGF |
| | | VLVVTTDALVFYASSTIQDYLGFQQSDVIHQSVYELIHTEDR |
| | | AEFQRQLHWALNPSQCTESGQGIEEATGLPQTVVCYNPDQIP |
| | | PENSPLMERCFICRLRCLLDNSSGFLAMNFQGKLKYLHGQKK |
| | | KGKDGSILPPQLALFAIATPLQPPSILEIRTKNFIFRTKHKL |
| | | PLRTKNGTSGKDSATTSTLSKDSLNPSSLLAAMMQQDESIYL |
| | | YPASSTSSTAPFENNFFNESMNECRNWQDNTAPMGNDTILK |
| | | HEQIDQPQDVNSFAGGHPGLFQDSKNSDLYSIMKNLGIDFE |
| | | DIRHMQNEKFFRNDFSGEVDFRDIDLTDEILTYVQDSLSKSP |
| | | FIPSDYQQQQSLALNSSCMVQEHLHLEQQQQHHQKQVVVE |
| | | PQQQLCQKMKHMQVNGMFENWNSNQFVPFNCPQQDPQQYNV |
| | | FTDLHGISQEFPYKSEMDSMPYTQNFISCNQPVLPQHSKCT |
| | | ELDYPMGSFEPSPYPTTSSLEDFVTCLQLPENQKHGLNPQS |
| | | AIITPQTCYAGAVSMYQCQPEPQHTHVGQMQYNPVLPGQQA |
| | | FLNKFQNGVLNETYPAELNNINNTQTTTHLQPLHHPSEARP |
| | | FPDLTSSGFL |
| 32 | Hs AhR | AUGAACAGCAGCAGCGCCAACAUCACCUACGCCAGCAG |
| | constitutively | AAAGAGACGAAAGCCGGUGCAGAAGACCGUGAAGCCUA |
| | active NT | UCCCGGCCGAGGGCAUCAAGAGCAACCCUAGUAAGAGA |
| | | CACCGGGAUCGCUUGAACACCGAGCUAGACCGGUUAGC |
| | | CUCCCUGCUGCCUUUCCCUCAGGACGUGAUCAACAAGC |
| | | UGGAUAAGCUGAGCGUCCUGCGUCUUAGCGUGUCAUAC |
| | | CUGAGAGCCAAGAGCUUCUUCGACGUGGCCUUGAAGUC |
| | | UAGCCCCACCGAGAGAAACGGCGGCCAGGACAACUGCC |
| | | GAGCUGCAAACUUCAGAGAAGGCCUUAACCUGCAGGAG |
| | | GGUGAGUUCCUGCUGCAGGCUCUGAACGGCUUCGUGCU |
| | | GGUCGUCACCACCGACGCACUGGUGUUCUAUGCAUCGA |
| | | GCACCAUCCAGGACUACCUGGGCUUCCAGCAGAGCGAC |
| | | GUUAUUCACCAGAGCGUGUACGAGCUGAUCCACACCGA |
| | | GGACAGAGCCGAGUUCCAGAGACAGCUGCACUGGGCAU |
| | | UGAAUCCUUCACAGUGCACCGAGUCGGGCCAAGGCAUC |
| | | GAGGAGGCCACCGGCCUGCCUCAGACCGUGGUCUGCUA |
| | | UAAUCCCGACCAGAUCCCUCCUGAGAACAGCCCUCUGA |
| | | UGGAGAGAUGCUUCAUCUGCCGUCUGAGAUGCCUGCUG |
| | | GACAACUCAAGCGGCUUCCUCGCCAUGAACUUCCAGGG |
| | | CAAGCUGAAGUACCUGCAUGGCCAGAAGAAGAAGGGCA |
| | | AGGACGGCAGCAUCCUGCCUCCUCAGCUGGCGCUGUUC |
| | | GCGAUUGCCACCCCUCUGCAGCCUCCUAGUAUCCUGGA |
| | | GAUCAGAACCAAGAAUUUCAUCUUCCGCACCAAGCACA |
| | | AGCUGCCUCUGCGAACCAAGAACGGCACCAGCGGCAAG |
| | | GAUAGUGCUACAACCUCUACCCUGAGCAAGGACUCACU |
| | | UAACCCGUCUUCACUGCUCGCCGCCAUGAUGCAGCAGG |
| | | ACGAGAGCAUCUAUCUGUACCCUGCAUCAUCCACAUCA |
| | | UCUACUGCCCCUUUCGAGAACAACUUCUUCAAUGAGAG |
| | | UAUGAACGAGUGCCGUAACUGGCAGGAUAACACAGCCC |
| | | CGAUGGGGAACGACACCAUCCUGAAGCACGAGCAGAUC |
| | | GACCAGCCUCAGGAUGUGAACAGCUUCGCGGGCGGCCA |
| | | CCCUGGCCUGUUCCAGGAUAGCAAGAACAGCGACCUGU |
| | | ACAGCAUCAUGAAGAAUCUCGGCAUCGACUUCGAGGAC |
| | | AUCAGACACAUGCAGAAUGAGAAGUUCUUCCGAAACGA |
| | | CUUCUCUGGAGAGGUGGAUUUCAGAGAUAUCGACCUGA |
| | | CCGACGAGAUCCUGACCUACGUGCAAGACUCCUUGAGC |
| | | AAGAGUCCUUUCAUACCCAGCGAUUACCAGCAGCAACA |
| | | GAGUCUGGCUUUAAAUUCAAGCUGCAUGGUGCAGGAGC |
| | | ACCUGCACCUGGAACAACAGCAACAACACCACCAGAAA |
| | | CAGGUGGUGGUGGAGCCUCAACAGCAGUUAUGUCAGAA |
| | | GAUGAAGCAUAUGCAAGUGAACGGAAUGUUCGAGAACU |
| | | GGAAUAGCAAUCAGUUCGUGCCUUUUAAUUGUCCUCAA |
| | | CAGGAUCCGCAACAGUACAAUGUGUUCACCGACCUGCA |
| | | CGGCAUCUCGCAGGAGUUCCCUUACAAGAGCGAGAUGG |
| | | AUAGCAUGCCUUAUACCCAGAACUUCAUCUCCUGCAAC |
| | | CAGCCAGUGCUACCUCAGCACAGCAAGUGUACGGAAUU |
| | | AGAUUACCCCAUGGGCAGUUUUGAGCCAAGCCCUUACC |
| | | CUACUACCUCCUCACUCGAAGACUUCGUGACCUGCCUG |
| | | CAGCUGCCGGAGAACCAGAAGCACGGCCUCAACCCUCA |
| | | GAGCGCCAUCAUUACCCCGCAAACUUGCUAUGCCGGAG |
| | | CCGUGAGUAUGUACCAGUGCCAGCCUGAGCCACAGCAC |
| | | ACCCACGUGGGCCAGAUGCAGUACAACCCUGUGCUGCC |
| | | CGGCCAGCAGGCCUUCCUGAACAAGUUCCAGAACGGCG |
| | | UGCUGAACGAGACAUACCCUGCGGAGCUGAACAACAUA |
| | | AACAACACACAGACCACCACACACCUCCAGCCUCUGCAC |
| | | CACCCUAGCGAGGCAAGACCCUUCCCUGAUCUUACAAG |
| | | UAGUGGAUUCCUG |
| 33 | Murine | MCPRAARAPATLLLALGAVLWPAAGAGGKPIPNPLLGLDST |
| | CD73 AA | WELTILHTNDVHSRLEQTSEDSSKCVNASRCMGGVARLFTK |
| | (affinity tag | VQQIRRAEPNVLLLDAGDQYQGTIWFTVYKGAEVAHFMNAL |
| | italicized and | RYDAMALGNHEFDNGVEGLIEPLLKEAKFPILSANIKAKGP |
| | underlined) | LASQISGLYLPYKVLPVGDEVVGIVGYTSKETPFLSNPGTNL |
| | | VFEDEITALQPEVDKLKTLNVNKIIALGHSGFEMDKLIAQKV |
| | | RGVDVVVGGHSNTFLYTGNPPSKEVPAGKYPFIVTSDDGRKV |
| | | PVVQAYAFGKYLGYLKIEFDERGNVISSHGNPILLNSSIPED |
| | | PSIKADINKWRIKLDNYSTQELGKTIVYLDGSSQSCRFRECN |
| | | MGNLICDAMINNNLRHTDEMFWNHVSMCILNGGGIRSPIDE |
| | | RNNGTITWENLAAVLPFGGTFDLVQLKGSTLKKAFEHSVHR |
| | | YGQSTGEFLQVGGIHVVYDLSRKPGDRVVKLDVLCTKCRV |
| | | PSYDPLKMDEVYKVILPNFLANGGDGFQMIKDELLRHDSGD |
| | | QDINVVSTYISKMKVIYPAVEGRIKFSTGSHCHGSFSLIFL |
| | | SLWAVIFVLYQ |
| 34 | Murine | AUGUGCCCUAGAGCCGCCAGAGCCCCAGCCACCUUGCU |
| | CD73 NT | ACUUGCCCUCGGCGCCGUGCUAUGGCCAGCAGCCGGUG |
| | | CGGGAGGCAAGCCUAUCCCUAACCCUUUGCUAGGCCUA |
| | | GACAGCACCUGGGAGCUCACCAUCUUACACACCAACGA |
| | | CGUGCACAGCAGACUGGAGCAGACCAGCGAGGACAGCA |
| | | GCAAGUGCGUGAACGCCAGCAGAUGCAUGGGCGGCGUG |
| | | GCCAGACUGUUCACCAAGGUGCAGCAGAUCCGCCGAGC |
| | | CGAGCCUAACGUGCUCCUGCUAGACGCCGGCGACCAGU |
| | | ACCAGGGCACCAUCUGGUUCACCGUGUACAAGGGCGCC |
| | | GAGGUGGCCCACUUCAUGAACGCCCUGAGAUACGACGC |
| | | CAUGGCAUUGGGAAACCACGAGUUCGACAACGGCGUGG |
| | | AGGGCCUGAUCGAGCCACUGCUUAAGGAGGCCAAGUUC |
| | | CCUAUCCUGAGCGCCAACAUCAAGGCCAAGGGCCCUCU |
| | | GGCCAGCCAGAUCAGCGGCCUGUACCUGCCUUACAAGG |
| | | UGCUGCCUGUGGGCGACGAGGUGGUGGGCAUCGUGGGC |
| | | UACACCAGCAAGGAAACCCCUUUCCUGAGCAACCCUGG |
| | | CACCAACCUGGUGUUCGAGGACGAGAUCACCGCCCUGC |
| | | AGCCUGAGGUGGACAAGCUGAAGACCCUGAACGUGAAC |
| | | AAGAUCAUCGCCCUUGGCCACAGCGGCUUCGAGAUGGA |
| | | UAAGUUAAUUGCUCAGAAGGUGAGAGGCGUGGACGUAG |
| | | UGGUUGGCGGUCACAGCAACACCUUCCUGUACACCGGC |
| | | AACCCUCCUUCGAAGGAGGUGCCUGCCGGCAAGUACCC |
| | | UUUCAUCGUCACAUCUGACGACGGCAGAAAGGUGCCAG |
| | | UCGUGCAGGCCUACGCCUUCGGAAAGUACCUGGGCUAC |
| | | CUGAAGAUAGAGUUCGAUGAGAGAGGCAACGUGAUCAG |
| | | CUCUCAUGGCAAUCCUAUACUGCUGAACUCUAGUAUCC |
| | | CUGAGGACCCUUCAAUUAAGGCCGACAUCAACAAGUGG |
| | | AGAAUCAAGCUGGACAACUACAGCACCCAGGAGCUGGG |
| | | CAAGACCAUCGUGUACCUGGACGGCUCGUCUCAGAGCU |
| | | GCAGAUUCAGAGAGUGCAACAUGGGCAACCUGAUCUGC |
| | | GACGCUAUGAUCAACAACAACCUGAGACACACCGACGA |
| | | GAUGUUCUGGAACCACGUGAGCAUGUGCAUCCUGAACG |
| | | GCGGCGGCAUCAGAAGCCCUAUCGACGAGCGGAACAAC |
| | | GGAACUAUCACUUGGGAGAACCUGGCAGCUGUGCUUCC |
| | | UUUCGGCGGCACCUUCGACCUGGUGCAGCUGAAGGGCA |
| | | GCACCCUGAAGAAGGCCUUCGAGCACUCGGUGCACAGA |
| | | UACGGCCAGAGCACCGGCGAGUUCCUGCAGGUGGGCGG |
| | | UAUACACGUGGUGUACGACCUGAGCAGAAAGCCUGGCG |
| | | ACAGAGUGGUGAAGCUAGAUGUCCUCUGCACCAAGUGC |
| | | AGAGUGCCUAGCUACGACCCUCUGAAGAUGGAUGAGGU |
| | | UUAUAAGGUCAUCCUGCCUAACUUCCUGGCCAACGGUG |
| | | GUGACGGCUUCCAGAUGAUCAAGGACGAGCUGUUGAGG |
| | | CACGACAGUGGCGAUCAAGAUAUAAACGUGGUGAGCAC |
| | | CUACAUCAGCAAGAUGAAGGUGAUCUACCCUGCGGUGG |
| | | AGGGACGGAUUAAGUUCUCAACUGGCUCUCAUUGCCAC |
| | | GGCAGCUUCAGCCUGAUCUUCCUGUCCUUGUGGGCCGU |
| | | GAUCUUCGUGCUGUACCAG |
| 35 | Murine | MEDTKESNVKTFCSKNILAILGFSSIIAVIALLAVGLTQNKA |
| | CD39 AA | LPENVKYGIVLDAGSSHTSLYIYKWPAEKENDTGVVHQVEEC |
| | (affinity tag | RVKGPGISKFVQKVNEIGIYLTDCMERAREVIPRSQHQETP |
| | italicized | VYLGATAGMRLLRMESEELADRVLDVVERSLSNYPFDFQGA |
| | and | RIITGQEEGAYGWITINYLLGKFSQKTRWFSIVPYETNNQET |
| | underlined) | FGALDLGGASTQVTFVPQNQTIESPDNALQFRLYGKDYNVYT |
| | | HSFLCYGKDQALWQKLAKDIQVASNEILRDPCFHPGYKKV |
| | | VNVSDLYKTPCTKRFEMTLPFQQFEIQGIGNYQQCHQSILEL |
| | | FNTSYCPYSQCAFNGIFLPPLQGDFGAFSAFYFVMKFLNLTS |
| | | EKVSQEKVTEMMKKFCAQPWEEIKTSYAGVKEKYLSEYCFSG |
| | | TYILSLLLQGYHFTADSWEHIHFIGKIQGSDAGWTLGYMLNL |
| | | TNMIPAEQPLSTPLSHSTYVFLMVLFSLVLFTVAIIGLLIFH |
| | | KPSYFWKDMVGGKPIPNPLLGLDST |
| 36 | Murine | AUGGAGGACACCAAGGAGAGCAACGUGAAGACCUUCUG |
| | CD39 NT | CAGCAAGAACAUCCUCGCCAUCCUCGGCUUCAGCAGCA |
| | | UCAUCGCCGUGAUCGCCCUCUUGGCCGUGGGCCUUACC |
| | | CAGAACAAGGCCCUUCCAGAGAACGUGAAGUACGGCAU |
| | | CGUGCUGGACGCCGGCAGCAGCCACACCAGCCUGUACA |
| | | UCUACAAGUGGCCUGCCGAGAAGGAGAACGACACCGGC |
| | | GUGGUGCACCAGGUGGAGGAGUGCAGAGUGAAGGGCCC |
| | | UGGCAUCAGCAAGUUCGUGCAGAAGGUGAACGAGAUCG |
| | | GCAUCUACCUGACCGACUGCAUGGAGAGAGCCAGAGAG |
| | | GUGAUCCCUAGAAGCCAGCACCAGGAGACUCCUGUGUA |
| | | CCUGGGCGCCACCGCCGGCAUGAGACUGCUAAGAAUGG |
| | | AGAGCGAGGAGCUGGCCGACAGAGUACUCGACGUGGUG |
| | | GAGAGAAGCCUGAGCAACUACCCUUUCGACUUCCAGGG |
| | | CGCCAGAAUCAUCACCGGCCAGGAGGAGGGCGCCUACG |
| | | GCUGGAUCACCAUCAACUACCUGCUGGGCAAGUUCAGC |
| | | CAGAAGACCAGAUGGUUCAGCAUUGUGCCUUACGAGAC |
| | | GAACAAUCAGGAAACAUUCGGCGCCCUGGACUUGGGCG |
| | | GCGCUUCAACUCAGGUGACCUUCGUGCCUCAGAACCAG |
| | | ACCAUCGAGAGCCCUGACAACGCCCUGCAGUUCAGACU |
| | | GUACGGCAAGGACUACAACGUGUACACCCACAGCUUCC |
| | | UGUGCUAUGGAAAGGAUCAGGCCCUGUGGCAGAAGCUG |
| | | GCCAAGGACAUCCAGGUGGCCAGCAAUGAAAUUCUGCG |
| | | CGACCCUUGCUUCCACCCUGGCUACAAGAAGGUGGUGA |
| | | ACGUGAGCGACCUGUACAAGACCCCUUGCACCAAGAGA |
| | | UUCGAGAUGACCCUGCCUUUCCAGCAGUUCGAGAUCCA |
| | | GGGCAUCGGAAACUACCAGCAGUGCCACCAGAGCAUCC |
| | | UGGAGCUGUUCAACACCAGCUACUGCCCUUACAGCCAG |
| | | UGCGCCUUCAACGGCAUCUUCCUGCCUCCUCUGCAGGG |
| | | CGACUUCGGAGCUUUCAGCGCCUUCUACUUCGUGAUGA |
| | | AGUUCCUGAACCUGACCAGCGAGAAGGUGAGCCAGGAG |
| | | AAGGUUACCGAGAUGAUGAAGAAGUUCUGCGCCCAGCC |
| | | UUGGGAGGAGAUCAAGACGAGCUAUGCCGGCGUCAAGG |
| | | AGAAGUACCUGAGCGAGUACUGCUUCAGCGGCACCUAC |
| | | AUCCUGAGCCUGCUGUUGCAGGGUUACCACUUCACCGC |
| | | CGACAGCUGGGAGCACAUCCACUUCAUAGGAAAGAUUC |
| | | AGGGUAGCGAUGCCGGAUGGACCCUGGGCUACAUGCUG |
| | | AAUCUAACCAACAUGAUCCCAGCUGAACAGCCUCUGAG |
| | | CACCCCAUUGUCACACAGCACCUACGUGUUCCUGAUGG |
| | | UGCUGUUCAGCCUGGUCCUAUUCACCGUGGCCAUCAUC |
| | | GGCCUGCUGAUCUUCCACAAGCCUAGCUACUUCUGGAA |
| | | GGACAUGGUGGGCGGCAAGCCUAUCCCUAACCCUCUGU |
| | | UGGGACUGGACAGCACC |
| 37 | Hs Arginase | MKWVTFLLLLFVSGSAFSRGVFRRESAKSRTIGIIGAPFSKG |
| | 1, Variant 1, | QPRGGVEEGPTVLRKAGLLEKLKEQECDVKDYGDLPFADIP |
| | Amino Acid | NDSPFQIVKNPRSVGKASEQLAGKVAEVKKNGRISLVLGGD |
| | | HSLAIGSISGHARVHPDLGVIWVDAHTDINTPLTTTSGNLHG |
| | | QPVSFLLKELKGKIPDVPGFSWVTPCISAKDIVYIGLRDVDP |
| | | GEHYILKTLGIKYFSMTEVDRLGIGKVMEETLSYLLGRKKRP |
| | | IHLSFDVDGLDPSFTPATGTPVVGGLTYREGLYITEEIYKTG |
| | | LLSGLDIMEVNPSLGKTPEEVTRTVNTAVAITLACFGLAREG |
| | | NHKPIDYLNPPK |
| 38 | Hs Arginase | AUGAAGUGGGUGACCUUCCUGCUGCUGCUGUUCGUGAG |
| | 1, Variant 1, | CGGCAGCGCCUUCAGCAGAGGCGUGUUCAGAAGAGAGA |
| | Nucleotide | GCGCCAAGAGCAGAACCAUCGGCAUCAUCGGCGCCCCU |
| | | UUCAGCAAGGGCCAGCCUAGAGGCGGCGUGGAGGAGGG |
| | | CCCUACCGUGCUGAGAAAGGCCGGCCUGCUGGAGAAGC |
| | | UGAAGGAGCAGGAGUGCGACGUGAAGGACUACGGCGAC |
| | | CUGCCUUUCGCCGACAUCCCUAACGACAGCCCUUUCCAG |
| | | AUCGUGAAGAACCCUAGAAGCGUGGGCAAGGCCAGCGA |
| | | GCAGCUGGCCGGCAAGGUGGCCGAGGUGAAGAAGAACG |
| | | GCAGAAUCAGCCUGGUGCUGGGCGGCGACCACAGCCUG |
| | | GCCAUCGGCAGCAUCAGCGGCCACGCCAGAGUGCACCC |
| | | UGACCUGGGCGUGAUCUGGGUGGACGCCCACACCGACA |
| | | UCAACACCCCUCUGACCACCACCAGCGGCAACCUGCACG |
| | | GCCAGCCUGUGAGCUUCCUGCUGAAGGAGCUGAAGGGC |
| | | AAGAUCCCUGACGUGCCUGGCUUCAGCUGGGUGACCCC |
| | | UUGCAUCAGCGCCAAGGACAUCGUGUACAUCGGCCUGA |
| | | GAGACGUGGACCCUGGCGAGCACUACAUCCUGAAGACC |
| | | CUGGGCAUCAAGUACUUCAGCAUGACCGAGGUGGACAG |
| | | ACUGGGCAUCGGCAAGGUGAUGGAGGAGACCCUGAGCU |
| | | ACCUGCUGGGCAGAAAGAAGAGACCUAUCCACCUGAGC |
| | | UUCGACGUGGACGGCCUGGACCCUAGCUUCACCCCUGC |
| | | CACCGGCACCCCUGUGGUGGGCGGCCUGACCUACAGAG |
| | | AGGGCCUGUACAUCACCGAGGAGAUCUACAAGACCGGC |
| | | CUGCUGAGCGGCCUGGACAUCAUGGAGGUGAACCCUAG |
| | | CCUGGGCAAGACCCCUGAGGAGGUGACCAGAACCGUGA |
| | | ACACCGCCGUGGCCAUCACCCUGGCCUGCUUCGGCCUGG |
| | | CCAGAGAGGGCAACCACAAGCCUAUCGACUACCUGAAC |
| | | CCUCCUAAG |
| 39 | Hs Arginase | MSAKSRTIGIIGAPFSKGQPRGGVEEGPTVLRKAGLLEKLKE |
| | 1, Variant 2, | QECDVKDYGDLPFADIPNDSPFQIVKNPRSVGKASEQLAGK |
| | Amino acid | VAEVKKNGRISLVLGGDHSLAIGSISGHARVHPDLGVIWVD |
| | | AHTDINTPLTTTSGNLHGQPVSFLLKELKGKIPDVPGFSWVT |
| | | PCISAKDIVYIGLRDVDPGEHYILKTLGIKYFSMTEVDRLGI |
| | | GKVMEETLSYLLGRKKRPIHLSFDVDGLDPSFTPATGTPVVG |
| | | GLTYREGLYITEEIYKTGLLSGLDIMEVNPSLGKTPEEVTRT |
| | | VNTAVAITLACFGLAREGNHKPIDYLNPPK |
| 40 | Hs Arginase | AUGAGCGCCAAGUCCAGAACCAUAGGGAUUAUUGGAGC |
| | 1, Variant 2, | UCCUUUCUCAAAGGGACAGCCACGAGGAGGGGUGGAAG |
| | Nucleotide | AAGGCCCUACAGUAUUGAGAAAGGCCGGUUUGCUUGAG |
| | | AAACUUAAAGAACAAGAGUGUGACGUGAAGGAUUACGG |
| | | GGACCUGCCCUUUGCUGACAUCCCUAAUGACAGUCCCU |
| | | UUCAAAUUGUGAAGAAUCCAAGGUCUGUGGGCAAGGCA |
| | | AGCGAGCAGCUGGCUGGCAAGGUGGCAGAAGUCAAGAA |
| | | GAACGGAAGAAUCAGCCUGGUGCUGGGCGGCGACCACA |
| | | GUUUGGCAAUUGGAAGCAUCUCUGGCCAUGCCAGGGUC |
| | | CACCCUGAUCUUGGAGUCAUCUGGGUGGAUGCUCACAC |
| | | UGAUAUCAACACUCCACUGACAACCACAAGUGGAAACU |
| | | UGCAUGGACAACCUGUAUCUUUCCUCCUGAAGGAACUU |
| | | AAGGGAAAGAUUCCCGAUGUGCCAGGAUUCUCCUGGGU |
| | | GACUCCCUGUAUAUCUGCCAAGGAUAUUGUGUAUAUUG |
| | | GCUUGAGAGACGUGGACCCUGGGGAACACUACAUUUUG |
| | | AAGACUCUAGGCAUUAAAUACUUUUCAAUGACUGAAGU |
| | | GGACAGACUAGGAAUUGGAAAGGUCAUGGAAGAAACAC |
| | | UCAGCUAUCUACUAGGAAGAAAGAAGAGGCCAAUUCAU |
| | | CUAAGUUUUGAUGUUGACGGACUGGACCCAUCUUUCAC |
| | | ACCAGCUACUGGCACACCAGUCGUGGGAGGUCUGACAU |
| | | ACAGAGAAGGACUGUACAUCACAGAAGAAAUCUACAAG |
| | | ACAGGGCUACUCUCAGGAUUAGAUAUAAUGGAAGUGAA |
| | | CCCAUCACUCGGAAAGACACCAGAAGAAGUAACUCGAA |
| | | CAGUGAACACAGCAGUUGCAAUAACCUUGGCUUGUUUC |
| | | GGACUUGCUCGGGAGGGUAAUCACAAGCCUAUUGACUA |
| | | CCUUAACCCACCUAAG |
| 41 | Human | MSLRGSLSRLLQTRVHSILKKSVHSVAVIGAPFSQGQKRKG |
| | Arginase 2, | VEHGPAAIREAGLMKRLSSLGCHLKDFGDLSFTPVPKDDLY |
| | Variant 1 | NNLIVNPRSVGLANQELAEVVSRAVSDGYSCVTLGGDHSLA |
| | Amino Acid | IGTISGHARHCPDLCVVWVDAHADINTPLTTSSGNLHGQPVS |
| | | FLLRELQDKVPQLPGFSWIKPCISSASIVYIGLRDVDPPEHF |
| | | ILKNYDIQYFSMRDIDRLGIQKVMERTFDLLIGKRQRPIHLS |
| | | DAFDPTLAPATGTPVVGGLTYREGMYIAEEIHNTGLLSALDL |
| | | FDIVEVNPQLATSEEEAKTTANLAVDVIASSFGQTREGGHIV |
| | | YDQLPTPSSPDESENQARVRI |
| 42 | Human | AUGUCCCUAAGGGGCAGCCUCUCGCGUCUCCUCCAGAC |
| | Arginase 2, | GCGAGUGCAUUCCAUCCUAAAGAAAUCCGUCCACUCCG |
| | Variant 1, | UGGCAGUGAUAGGAGCCCCGUUCUCACAAGGGCAGAAG |
| | Nucleotide | CGAAAGGGAGUGGAGCACGGUCCCGCGGCCAUAAGAGA |
| | | AGCUGGCUUGAUGAAGAGGCUCUCCAGUUUGGGCUGCC |
| | | ACCUAAAGGACUUUGGAGAUUUGAGUUUUACUCCAGUC |
| | | CCCAAAGAUGAUCUCUACAACAACCUGAUAGUGAAUCC |
| | | ACGCUCAGUGGGUCUUGCCAACCAGGAACUGGCUGAGG |
| | | UGGUUAGCAGAGCUGUGUCAGAUGGCUACUCUUGCGUC |
| | | ACACUGGGAGGUGAUCACAGCCUGGCAAUCGGUACCAU |
| | | UAGUGGCCAUGCCCGACACUGCCCAGACCUUUGUGUUG |
| | | UCUGGGUUGAUGCCCAUGCUGACAUCAACACACCCCUU |
| | | ACCACUUCAUCAGGAAAUCUCCAUGGACAGCCAGUUUC |
| | | AUUUCUCCUCAGAGAACUACAGGAUAAGGUACCACAAC |
| | | UCCCAGGAUUUUCCUGGAUCAAACCUUGUAUCUCUUCU |
| | | GCAAGUAUUGUGUAUAUUGGUCUGAGAGACGUGGACCC |
| | | UCCUGAACACUUCAUAUUGAAGAACUAUGAUAUCCAGU |
| | | AUUUCUCCAUGAGAGAUAUUGAUCGACUUGGUAUCCAG |
| | | AAGGUCAUGGAACGAACAUUUGAUCUGCUGAUUGGCAA |
| | | GAGACAAAGACCAAUCCAUCUCUCUUUCGAUAUCGACG |
| | | CAUUUGACCCUACACUGGCUCCAGCCACAGGAACUCCU |
| | | GUUGUCGGCGGACUAACCUAUCGAGAAGGCAUGUACAU |
| | | CGCUGAGGAAAUACACAAUACAGGGUUGCUAUCAGCAC |
| | | UGGAUCUUGUUGAAGUCAAUCCUCAGUUGGCCACCUCA |
| | | GAGGAAGAGGCGAAGACUACAGCUAACCUGGCAGUAGA |
| | | UGUGAUUGCUUCAAGCUUUGGUCAGACAAGAGAAGGAG |
| | | GGCAUAUUGUCUAUGACCAACUUCCUACUCCCAGUUCA |
| | | CCAGAUGAAUCAGAGAAUCAAGCACGUGUGAGAAUU |

Note:
Membrane anchoring moiety is underlined

[0793] In some embodiments, a polynucleotide of the present disclosure, for example a polynucleotide comprising an mRNA nucleotide sequence encoding an IDO polypeptide and a membrane anchoring moiety, comprises (1) a 5′ cap, e.g., as disclosed herein, e.g., as provided in Table 2A, (2) a 5′ UTR, e.g., as provided in Table 2A, (3) a nucleotide sequence ORF provided 10 in Table 2A, e.g., SEQ ID NO: 2, 3, 24, 5, 7, 9, 11, 13-15, 17, 19, 21, 23, 26, 28, 30, 32, 34, 36, 38, 40, or 42, (4) a stop codon, (5) a 3′UTR, e.g., as provided in Table 2A, and (6) a tail (e.g., poly-A tail), e.g., as disclosed herein, e.g., a poly-A tail of about 100 residues (e.g., SEQ ID NO: 502 or 209).

[0794] In some embodiments, the polynucleotide comprises an mRNA nucleotide sequence encoding an IDO polypeptide and a membrane anchoring moiety.

[0795] In some embodiments, the polynucleotide comprising an mRNA nucleotide sequence encoding the IDO polypeptide and the membrane anchoring moiety comprises the nucleotide sequence of SEQ ID NO: 300, which comprises from 5′ to 3′ end: 5′ UTR of SEQ ID NO: 50, ORF sequence of SEQ ID NO: 3, and 3′ UTR of SEQ ID NO: 140.

[0796] In some embodiments, the polynucleotide comprising an mRNA nucleotide sequence encoding the IDO polypeptide and the membrane anchoring moiety comprises the nucleotide sequence of SEQ ID NO: 301, which comprises from 5′ to 3′ end: 5′ UTR of SEQ ID NO: 50, ORF sequence of SEQ ID NO: 3, and 3′ UTR of SEQ ID NO: 140.

[0797] In some embodiments, the polynucleotide comprising an mRNA nucleotide sequence encoding the IDO polypeptide and the membrane anchoring moiety comprises the nucleotide sequence of SEQ ID NO: 302, which comprises from 5′ to 3′ end: 5′ UTR of SEQ ID NO: 50, ORF sequence of SEQ ID NO: 3, and 3′ UTR of SEQ ID NO: 141.

[0798] In some embodiments, the polynucleotide comprising an mRNA nucleotide sequence encoding the IDO polypeptide and the membrane anchoring moiety comprises the nucleotide sequence of SEQ ID NO: 303, which comprises from 5′ to 3′ end: 5′ UTR of SEQ ID NO: 50, ORF sequence of SEQ ID NO: 3, and 3′ UTR of SEQ ID NO: 141.

[0799] In some embodiments, the polynucleotide comprising an mRNA nucleotide sequence encoding the IDO polypeptide and the membrane anchoring moiety comprises the nucleotide sequence of SEQ ID NO: 304, which comprises from 5′ to 3′ end: 5′ UTR of SEQ ID NO: 50, ORF sequence of SEQ ID NO: 2, and 3′ UTR of SEQ ID NO: 141.

[0800] In some embodiments, the polynucleotide comprising an mRNA nucleotide sequence encoding the IDO polypeptide and the membrane anchoring moiety comprises the nucleotide sequence of SEQ ID NO: 305, which comprises from 5′ to 3′ end: 5′ UTR of SEQ ID NO: 50, ORF sequence of SEQ ID NO: 2, and 3′ UTR of SEQ ID NO: 141.

[0801] In some embodiments, the polynucleotide comprising an mRNA nucleotide sequence encoding the IDO polypeptide and the membrane anchoring moiety comprises the nucleotide sequence of SEQ ID NO: 306, which comprises from 5′ to 3′ end: 5′ UTR of SEQ ID NO: 50, ORF sequence of SEQ ID NO: 2, and 3′ UTR of SEQ ID NO: 108.

[0802] In some embodiments, the polynucleotide comprising an mRNA nucleotide sequence encoding the IDO polypeptide and the membrane anchoring moiety comprises the nucleotide sequence of SEQ ID NO: 307, which comprises from 5′ to 3′ end: 5′ UTR of SEQ ID NO: 50, ORF sequence of SEQ ID NO: 2, and 3′ UTR of SEQ ID NO: 140.

[0803] In some embodiments, the polynucleotide comprising an mRNA nucleotide sequence encoding the IDO polypeptide and the membrane anchoring moiety comprises the nucleotide sequence of SEQ ID NO: 308, which comprises from 5′ to 3′ end: 5′ UTR of SEQ ID NO: 50, ORF sequence of SEQ ID NO: 3, and 3′ UTR of SEQ ID NO: 108.

[0804] In some embodiments, the polynucleotide comprising an mRNA nucleotide sequence encoding the IDO polypeptide and the membrane anchoring moiety comprises the nucleotide sequence of SEQ ID NO: 309, which comprises from 5′ to 3′ end: 5′ UTR of SEQ ID NO: 50, ORF sequence of SEQ ID NO: 3, and 3′ UTR of SEQ ID NO: 100.

[0805] In some embodiments, the polynucleotide comprising an mRNA nucleotide sequence encoding the IDO polypeptide and the membrane anchoring moiety comprises the nucleotide sequence of SEQ ID NO: 310, which comprises from 5′ to 3′ end: 5′ UTR of SEQ ID NO: 50, ORF sequence of SEQ ID NO: 24, and 3′ UTR of SEQ ID NO: 108.

[0806] In some embodiments, the polynucleotide comprising an mRNA nucleotide sequence encoding the IDO polypeptide and the membrane anchoring moiety comprises the nucleotide sequence of SEQ ID NO: 311, which comprises from 5′ to 3′ end: 5′ UTR of SEQ ID NO: 50, ORF sequence of SEQ ID NO: 5, and 3′ UTR of SEQ ID NO: 140.

[0807] In some embodiments, the polynucleotide comprising an mRNA nucleotide sequence encoding the IDO polypeptide and the membrane anchoring moiety comprises the nucleotide sequence of SEQ ID NO: 312, which comprises from 5′ to 3′ end: 5′ UTR of SEQ ID NO: 50, ORF sequence of SEQ ID NO: 5, and 3′ UTR of SEQ ID NO: 141.

[0808] In some embodiments, the polynucleotide comprising an mRNA nucleotide sequence encoding the IDO polypeptide and the membrane anchoring moiety comprises the nucleotide sequence of SEQ ID NO: 313, which comprises from 5′ to 3′ end: 5′ UTR of SEQ ID NO: 50, ORF sequence of SEQ ID NO: 5, and 3′ UTR of SEQ ID NO: 140.

[0809] In some embodiments, the polynucleotide comprising an mRNA nucleotide sequence encoding the IDO polypeptide and the membrane anchoring moiety comprises the nucleotide sequence of SEQ ID NO: 314, which comprises from 5′ to 3′ end: 5′ UTR of SEQ ID NO: 50, ORF sequence of SEQ ID NO: 5, and 3′ UTR of SEQ ID NO: 141.

[0810] In some embodiments, the polynucleotide comprising an mRNA nucleotide sequence encoding the IDO polypeptide and the membrane anchoring moiety comprises the nucleotide sequence of SEQ ID NO: 315, which comprises from 5′ to 3′ end: 5′ UTR of SEQ ID NO: 50, ORF sequence of SEQ ID NO: 5, and 3′ UTR of SEQ ID NO: 140.

[0811] In some embodiments, the polynucleotide comprising an mRNA nucleotide sequence encoding the IDO polypeptide and the membrane anchoring moiety comprises the nucleotide sequence of SEQ ID NO: 316, which comprises from 5′ to 3′ end: 5′ UTR of SEQ ID NO: 55, ORF sequence of SEQ ID NO: 7, and 3′ UTR of SEQ ID NO: 107.

[0812] In some embodiments, the polynucleotide comprising an mRNA nucleotide sequence encoding the IDO polypeptide and the membrane anchoring moiety comprises the nucleotide sequence of SEQ ID NO: 317, which comprises from 5′ to 3′ end: 5′ UTR of SEQ ID NO: 56, ORF sequence of SEQ ID NO: 17, and 3′ UTR of SEQ ID NO: 108.

[0813] In some embodiments, the polynucleotide comprising an mRNA nucleotide sequence encoding the IDO polypeptide and the membrane anchoring moiety comprises the nucleotide sequence of SEQ ID NO: 318, which comprises from 5′ to 3′ end: 5′ UTR of SEQ ID NO: 56, ORF sequence of SEQ ID NO: 19, and 3′ UTR of SEQ ID NO: 108.

[0814] In some embodiments, the polynucleotide comprising an mRNA nucleotide sequence encoding the IDO polypeptide and the membrane anchoring moiety comprises the nucleotide sequence of SEQ ID NO: 332, which comprises from 5′ to 3′ end: 5′ UTR of SEQ ID NO: 55, ORF sequence of SEQ ID NO: 9, and 3′ UTR of SEQ ID NO: 107.

[0815] In some embodiments, the polynucleotide comprises an mRNA nucleotide sequence encoding a TDO polypeptide and a membrane anchoring moiety.

[0816] In some embodiments, the polynucleotide comprising an mRNA nucleotide sequence encoding the TDO polypeptide and the membrane anchoring moiety comprises the nucleotide sequence of SEQ ID NO: 319, which comprises from 5′ to 3′ end: 5′ UTR of SEQ ID NO: 55, ORF sequence of SEQ ID NO: 11, and 3′ UTR of SEQ ID NO: 107.

[0817] In some embodiments, the polynucleotide comprising an mRNA nucleotide sequence encoding the TDO polypeptide and the membrane anchoring moiety comprises the nucleotide sequence of SEQ ID NO: 320, which comprises from 5′ to 3′ end: 5′ UTR of SEQ ID NO: 55, ORF sequence of SEQ ID NO: 13, and 3′ UTR of SEQ ID NO: 107.

[0818] In some embodiments, the polynucleotide comprising an mRNA nucleotide sequence encoding the TDO polypeptide and the membrane anchoring moiety comprises the nucleotide sequence of SEQ ID NO: 321, which comprises from 5′ to 3′ end: 5′ UTR of SEQ ID NO: 50, ORF sequence of SEQ ID NO: 13, and 3′ UTR of SEQ ID NO: 108.

[0819] In some embodiments, the polynucleotide comprising an mRNA nucleotide sequence encoding the TDO polypeptide and the membrane anchoring moiety comprises the nucleotide sequence of SEQ ID NO: 322, which comprises from 5′ to 3′ end: 5′ UTR of SEQ ID NO: 50, ORF sequence of SEQ ID NO: 13, and 3′ UTR of SEQ ID NO: 140.

[0820] In some embodiments, the polynucleotide comprising an mRNA nucleotide sequence encoding the TDO polypeptide and the membrane anchoring moiety comprises the nucleotide sequence of SEQ ID NO: 323, which comprises from 5′ to 3′ end: 5′ UTR of SEQ ID NO: 50, ORF sequence of SEQ ID NO: 14, and 3′ UTR of SEQ ID NO: 108.

[0821] In some embodiments, the polynucleotide comprising an mRNA nucleotide sequence encoding the TDO polypeptide and the membrane anchoring moiety comprises the nucleotide sequence of SEQ ID NO: 324, which comprises from 5′ to 3′ end: 5′ UTR of SEQ ID NO: 50, ORF sequence of SEQ ID NO: 14, and 3′ UTR of SEQ ID NO: 140.

[0822] In some embodiments, the polynucleotide comprising an mRNA nucleotide sequence encoding the TDO polypeptide and the membrane anchoring moiety comprises the nucleotide sequence of SEQ ID NO: 325, which comprises from 5′ to 3′ end: 5′ UTR of SEQ ID NO: 50, ORF sequence of SEQ ID NO: 14, and 3′ UTR of SEQ ID NO: 141.

[0823] In some embodiments, the polynucleotide comprising an mRNA nucleotide sequence encoding the TDO polypeptide and the membrane anchoring moiety comprises the nucleotide sequence of SEQ ID NO: 326, which comprises from 5′ to 3′ end: 5′ UTR of SEQ ID NO: 50, ORF sequence of SEQ ID NO: 14, and 3′ UTR of SEQ ID NO: 100.

[0824] In some embodiments, the polynucleotide comprising an mRNA nucleotide sequence encoding the TDO polypeptide and the membrane anchoring moiety comprises the nucleotide sequence of SEQ ID NO: 327, which comprises from 5′ to 3′ end: 5′ UTR of SEQ ID NO: 50, ORF sequence of SEQ ID NO: 15, and 3′ UTR of SEQ ID NO: 108.

[0825] In some embodiments, the polynucleotide comprising an mRNA nucleotide sequence encoding the TDO polypeptide and the membrane anchoring moiety comprises the nucleotide sequence of SEQ ID NO: 328, which comprises from 5′ to 3′ end: 5′ UTR of SEQ ID NO: 55, ORF sequence of SEQ ID NO: 13, and 3′ UTR of SEQ ID NO: 107.

[0826] In some embodiments, the polynucleotide comprising an mRNA nucleotide sequence encoding the TDO polypeptide and the membrane anchoring moiety comprises the nucleotide sequence of SEQ ID NO: 329, which comprises from 5′ to 3′ end: 5′ UTR of SEQ ID NO: 50, ORF sequence of SEQ ID NO: 14, and 3′ UTR of SEQ ID NO: 140.

[0827] In some embodiments, the polynucleotide comprising an mRNA nucleotide sequence encoding the TDO polypeptide and the membrane anchoring moiety comprises the nucleotide sequence of SEQ ID NO: 330, which comprises from 5′ to 3′ end: 5′ UTR of SEQ ID NO: 56, ORF sequence of SEQ ID NO: 21, and 3′ UTR of SEQ ID NO: 108.

[0828] In some embodiments, the polynucleotide comprising an mRNA nucleotide sequence encoding the TDO polypeptide and the membrane anchoring moiety comprises the nucleotide sequence of SEQ ID NO: 331, which comprises from 5′ to 3′ end: 5′ UTR of SEQ ID NO: 56, ORF sequence of SEQ ID NO: 23, and 3′ UTR of SEQ ID NO: 108.

[0829] In some embodiments, all of the 5′ UTR, ORF, and/or 3′ UTR sequences include the modification(s) described in Table 2A. In some embodiments, one, two, or all of the 5′ UTR, ORF, and/or 3′ UTR sequences do not include the modification(s) described in Table 2A. In some embodiments, the 5′ UTRs described in Table 2A additionally comprise a first nucleotide that is an “A” or a “G.”

TABLE 2A
Exemplary metabolic reprogramming molecule construct sequences

| | | | | | |
|---|---|---|---|---|---|
| mRNA | ORF Sequence | ORF Sequence | 5′ UTR | 3′ UTR | Construct |
| Description | (Amino Acid) | (Nucleotide) | Sequence | Sequence | Sequence |

Human IDO1 Constructs

| SEQ ID | | | | | | |
|---|---|---|---|---|---|---|
| NO: | | 1 | 3 | 50 | 140 | 300 |
| Human | IDO | MGSSKSKPKDPSQRR | AUGGGGUCGUCGAAG | GGAAAU | UAAGUC | SEQ ID |
| IDO1 | G5 | RGGGSAHAMENSWTI | UCGAAGCCGAAAGAU | CGCAAA | UCCGCU | NO: 300 |
| Variant | Cap C1 | SKEYHIDEEVGFALP | CCUAGUCAGCGCAGG | AUUUGC | GGAGCC | comprises |
| 1.1 | Poly A | NPQENLPDFYNDWMF | AGGGGAGGAGGAUCC | UCUUCG | UCGGUG | from |
| | tail: | IAKHLPDLIESGQLR | GCCCACGCCAUGGAG | CGUUAG | GCCUAG | 5′ to 3′ |
| | 100 nt | ERVEKLNMLSIDHLT | AACAGCUGGACCAUC | AUUUCU | CUUCUU | end: 5′ |
| | (SEQ ID | DHKSQRLARLVLGCI | AGCAAGGAGUACCAC | UUUAGU | GCCCCU | UTR of |
| | NO: 502) | TMAYVWGKGHGDVRK | AUCGACGAGGAGGUG | UUUCUC | UGGGCC | SEQ ID |
| | | VLPRNIAVPYCQLSK | GGCUUCGCCCUGCCC | GCAACU | UCCCCC | NO: 50, |
| | | KLELPPILVYADCVL | AACCCACAGGAGAAC | AGCAAG | CAGCCC | ORF |
| | | ANWKKKDPNKPLTYE | CUGCCCGACUUCUAC | CUUUUU | CUCCUC | sequence |
| | | NMDVLFSFRDGDCSK | AACGACUGGAUGUUC | GUUCUC | CCCUUC | of SEQ |
| | | GFFLVSLLVEIAAAS | AUCGCCAAGCACCUG | GCC | CUGCAC | ID NO: |
| | | AIKVIPTVFKAMQMQ | CCCGACCUGAUCGAG | | CCGUAC | 3, and |
| | | ERDTLLKALLEIASC | AGCGGGCAGCUGCGG | | CCCCGU | 3′ UTR |
| | | LEKALQVFHQIHDHV | GAACGGGUGGAGAAG | | GGUCUU | sequence |
| | | NPKAFFSVLRIYLSG | CUGAACAUGCUGAGC | | UGAAUA | of SEQ |
| | | WKGNPQLSDGLVYEG | AUCGACCACCUGACC | | AAGUCU | ID NO: |
| | | FWEDPKEFAGGSAGQ | GACCACAAGUCCCAG | | GAGUGG | 140. |
| | | SSVFQCFDVLLGIQQ | CGGUUGGCUCGGCUG | | GCGGC | |
| | | TAGGGHAAQFLQDMR | GUGCUGGGCUGCAUC | | | |
| | | RYMPPAHRNFLCSLE | ACCAUGGCCUACGUG | | | |
| | | SNPSVREFVLSKGDA | UGGGGAAAGGGGCAC | | | |
| | | GLREAYDACVKALVS | GGUGACGUGCGGAAG | | | |
| | | LRSYHLQIVTKYILI | GUGCUGCCCCGCAAC | | | |
| | | PASQQPKENKTSEDP | AUCGCCGUGCCCUAC | | | |
| | | SKLEAKGTGGTDLMN | UGCCAGCUGAGCAAG | | | |
| | | FLKTVRSTTEKSLLK | AAGCUGGAGCUGCCU | | | |
| | | EGGKPIPNPLLGLDS | CCGAUCCUGGUGUAC | | | |
| | | T | GCCGACUGCGUGCUG | | | |
| | | | GCCAACUGGAAGAAG | | | |
| | | | AAGGACCCCAACAAG | | | |
| | | | CCCCUGACCUACGAG | | | |
| | | | AACAUGGACGUGCUG | | | |
| | | | UUCUCCUUCCGGGAC | | | |
| | | | GGGGACUGCAGCAAG | | | |
| | | | GGGUUCUUCCUGGUG | | | |
| | | | AGCCUGCUGGUGGAG | | | |
| | | | AUCGCCGCCGCCUCU | | | |
| | | | GCCAUCAAGGUGAUC | | | |
| | | | CCCACCGUGUUCAAG | | | |
| | | | GCCAUGCAGAUGCAG | | | |
| | | | GAGAGGGACACCCUG | | | |
| | | | CUGAAGGCCCUGCUG | | | |
| | | | GAGAUCGCCAGCUGC | | | |
| | | | CUGGAGAAGGCCCUG | | | |
| | | | CAGGUGUUCCACCAG | | | |
| | | | AUCCACGACCACGUG | | | |
| | | | AACCCCAAGGCCUUC | | | |
| | | | UUCAGCGUGCUGCGC | | | |
| | | | AUCUACCUGUCCGGC | | | |
| | | | UGGAAGGGCAAUCCC | | | |
| | | | CAGCUGAGCGACGGC | | | |
| | | | CUGGUGUACGAGGGC | | | |
| | | | UUCUGGGAGGACCCC | | | |
| | | | AAGGAAUUUGCUGGC | | | |
| | | | GGUAGCGCUGGCCAG | | | |
| | | | UCCAGCGUGUUCCAG | | | |
| | | | UGCUUCGACGUGCUG | | | |
| | | | CUGGGCAUUCAGCAA | | | |
| | | | ACCGCUGGAGGCGGA | | | |
| | | | CACGCUGCCCAGUUC | | | |
| | | | CUGCAGGACAUGCGG | | | |
| | | | CGGUACAUGCCACCG | | | |
| | | | GCCCACCGCAACUUC | | | |
| | | | CUGUGCUCCCUGGAG | | | |
| | | | AGCAACCCCUCCGUG | | | |
| | | | CGGGAGUUCGUGCUG | | | |
| | | | UCCAAGGGCGACGCC | | | |
| | | | GGACUGAGGGAGGCC | | | |
| | | | UACGACGCCUGCGUG | | | |
| | | | AAGGCCCUGGUGUCC | | | |
| | | | CUGCGCAGCUACCAC | | | |
| | | | CUGCAGAUCGUGACC | | | |
| | | | AAGUACAUCCUGAUC | | | |
| | | | CCCGCAAGCCAGCAG | | | |
| | | | CCCAAGGAGAACAAG | | | |
| | | | ACCAGCGAGGACCCC | | | |
| | | | UCCAAGCUGGAAGCU | | | |
| | | | AAGGGCACCGGCGGC | | | |
| | | | ACUGACCUGAUGAAC | | | |
| | | | UUCCUGAAGACCGUG | | | |
| | | | CGGAGCACCACCGAG | | | |
| | | | AAGAGCCUGCUGAAG | | | |
| | | | GAGGGCGGGAAGCCG | | | |
| | | | AUCCCGAAUCCCCUC | | | |
| | | | CUCGGGCUCGACUCG | | | |
| | | | ACG | | | |
| SEQ ID | | | | | | |
| NO: | | 1 | 3 | 50 | 140 | 301 |
| Human | IDO | MGSSKSKPKDPSQRR | AUGGGGUCGUCGAAG | GGAAAU | UAAGUC | SEQ ID |
| IDO1 | G5 | RGGGSAHAMENSWTI | UCGAAGCCGAAAGAU | CGCAAA | UCCGCU | NO: 301 |
| Variant | Cap C1 | SKEYHIDEEVGFALP | CCUAGUCAGCGCAGG | AUUUGC | GGAGCC | comprises |
| 1.2 | A100-A20- | NPQENLPDFYNDWMF | AGGGGAGGAGGAUCC | UCUUCG | UCGGUG | from |
| | idT nt | IAKHLPDLIESGQLR | GCCCACGCCAUGGAG | CGUUAG | GCCUAG | 5′ to 3′ |
| | (SEQ ID | ERVEKLNMLSIDHLT | AACAGCUGGACCAUC | AUUUCU | CUUCUU | end: 5′ |
| | NO: 709) | DHKSQRLARLVLGCI | AGCAAGGAGUACCAC | UUUAGU | GCCCCU | UTR of |
| | | TMAYVWGKGHGDVRK | AUCGACGAGGAGGUG | UUUCUC | UGGGCC | SEQ ID |
| | | VLPRNIAVPYCQLSK | GGCUUCGCCCUGCCC | GCAACU | UCCCCC | NO: 50, |
| | | KLELPPILVYADCVL | AACCCACAGGAGAAC | AGCAAG | CAGCCC | ORF |
| | | ANWKKKDPNKPLTYE | CUGCCCGACUUCUAC | CUUUUU | CUCCUC | sequence |
| | | NMDVLFSFRDGDCSK | AACGACUGGAUGUUC | GUUCUC | CCCUUC | of SEQ |
| | | GFFLVSLLVEIAAAS | AUCGCCAAGCACCUG | GCC | CUGCAC | ID NO: |
| | | AIKVIPTVFKAMQMQ | CCCGACCUGAUCGAG | | CCGUAC | 3, and |
| | | ERDTLLKALLEIASC | AGCGGGCAGCUGCGG | | CCCCGU | 3′ UTR |
| | | LEKALQVFHQIHDHV | GAACGGGUGGAGAAG | | GGUCUU | sequence |
| | | NPKAFFSVLRIYLSG | CUGAACAUGCUGAGC | | UGAAUA | of SEQ |
| | | WKGNPQLSDGLVYEG | AUCGACCACCUGACC | | AAGUCU | ID NO: |
| | | FWEDPKEFAGGSAGQ | GACCACAAGUCCCAG | | GAGUGG | 140. |
| | | SSVFQCFDVLLGIQQ | CGGUUGGCUCGGCUG | | GCGGC | |
| | | TAGGGHAAQFLQDMR | GUGCUGGGCUGCAUC | | | |
| | | RYMPPAHRNFLCSLE | ACCAUGGCCUACGUG | | | |
| | | SNPSVREFVLSKGDA | UGGGGAAAGGGGCAC | | | |
| | | GLREAYDACVKALVS | GGUGACGUGCGGAAG | | | |
| | | LRSYHLQIVTKYILI | GUGCUGCCCCGCAAC | | | |
| | | PASQQPKENKTSEDP | AUCGCCGUGCCCUAC | | | |
| | | SKLEAKGTGGTDLMN | UGCCAGCUGAGCAAG | | | |
| | | FLKTVRSTTEKSLLK | AAGCUGGAGCUGCCU | | | |
| | | EGGKPIPNPLLGLDS | CCGAUCCUGGUGUAC | | | |
| | | T | GCCGACUGCGUGCUG | | | |
| | | | GCCAACUGGAAGAAG | | | |
| | | | AAGGACCCCAACAAG | | | |
| | | | CCCCUGACCUACGAG | | | |
| | | | AACAUGGACGUGCUG | | | |
| | | | UUCUCCUUCCGGGAC | | | |
| | | | GGGGACUGCAGCAAG | | | |
| | | | GGGUUCUUCCUGGUG | | | |
| | | | AGCCUGCUGGUGGAG | | | |
| | | | AUCGCCGCCGCCUCU | | | |
| | | | GCCAUCAAGGUGAUC | | | |
| | | | CCCACCGUGUUCAAG | | | |
| | | | GCCAUGCAGAUGCAG | | | |
| | | | GAGAGGGACACCCUG | | | |
| | | | CUGAAGGCCCUGCUG | | | |
| | | | GAGAUCGCCAGCUGC | | | |
| | | | CUGGAGAAGGCCCUG | | | |
| | | | CAGGUGUUCCACCAG | | | |
| | | | AUCCACGACCACGUG | | | |
| | | | AACCCCAAGGCCUUC | | | |
| | | | UUCAGCGUGCUGCGC | | | |
| | | | AUCUACCUGUCCGGC | | | |
| | | | UGGAAGGGCAAUCCC | | | |
| | | | CAGCUGAGCGACGGC | | | |
| | | | CUGGUGUACGAGGGC | | | |
| | | | UUCUGGGAGGACCCC | | | |
| | | | AAGGAAUUUGCUGGC | | | |
| | | | GGUAGCGCUGGCCAG | | | |
| | | | UCCAGCGUGUUCCAG | | | |
| | | | UGCUUCGACGUGCUG | | | |
| | | | CUGGGCAUUCAGCAA | | | |
| | | | ACCGCUGGAGGCGGA | | | |
| | | | CACGCUGCCCAGUUC | | | |
| | | | CUGCAGGACAUGCGG | | | |
| | | | CGGUACAUGCCACCG | | | |
| | | | GCCCACCGCAACUUC | | | |
| | | | CUGUGCUCCCUGGAG | | | |
| | | | AGCAACCCCUCCGUG | | | |
| | | | CGGGAGUUCGUGCUG | | | |
| | | | UCCAAGGGCGACGCC | | | |
| | | | GGACUGAGGGAGGCC | | | |
| | | | UACGACGCCUGCGUG | | | |
| | | | AAGGCCCUGGUGUCC | | | |
| | | | CUGCGCAGCUACCAC | | | |
| | | | CUGCAGAUCGUGACC | | | |
| | | | AAGUACAUCCUGAUC | | | |
| | | | CCCGCAAGCCAGCAG | | | |
| | | | CCCAAGGAGAACAAG | | | |
| | | | ACCAGCGAGGACCCC | | | |
| | | | UCCAAGCUGGAAGCU | | | |
| | | | AAGGGCACCGGCGGC | | | |
| | | | ACUGACCUGAUGAAC | | | |
| | | | UUCCUGAAGACCGUG | | | |
| | | | CGGAGCACCACCGAG | | | |
| | | | AAGAGCCUGCUGAAG | | | |
| | | | GAGGGCGGGAAGCCG | | | |
| | | | AUCCCGAAUCCCCUC | | | |
| | | | CUCGGGCUCGACUCG | | | |
| | | | ACG | | | |
| SEQ ID | | | | | | |
| NO: | | 1 | 3 | 50 | 141 | 302 |
| Human | IDO | MGSSKSKPKDPSQRR | AUGGGGUCGUCGAAG | GGAAAU | UAAGCC | SEQ ID |
| IDO1 | G5 | RGGGSAHAMENSWTI | UCGAAGCCGAAAGAU | CGCAAA | CCUCCG | NO: 302 |
| Variant | Cap C1 | SKEYHIDEEVGFALP | CCUAGUCAGCGCAGG | AUUUGC | GGGGCC | comprises |
| 1.3 | Poly A | NPQENLPDFYNDWMF | AGGGGAGGAGGAUCC | UCUUCG | UCGGUG | from |
| | tail: | IAKHLPDLIESGQLR | GCCCACGCCAUGGAG | CGUUAG | GCCUAG | 5′ to 3′ |
| | 100 nt | ERVEKLNMLSIDHLT | AACAGCUGGACCAUC | AUUUCU | CUUCUU | end: 5′ |
| | (SEQ ID | DHKSQRLARLVLGCI | AGCAAGGAGUACCAC | UUUAGU | GCCCCU | UTR of |
| | NO: 502) | TMAYVWGKGHGDVRK | AUCGACGAGGAGGUG | UUUCUC | UGGGCC | SEQ ID |
| | | VLPRNIAVPYCQLSK | GGCUUCGCCCUGCCC | GCAACU | UCCCCC | NO: 50, |
| | | KLELPPILVYADCVL | AACCCACAGGAGAAC | AGCAAG | CAGCCC | ORF |
| | | ANWKKKDPNKPLTYE | CUGCCCGACUUCUAC | CUUUUU | CUCCUC | sequence |
| | | NMDVLFSFRDGDCSK | AACGACUGGAUGUUC | GUUCUC | CCCUUC | of SEQ |
| | | GFFLVSLLVEIAAAS | AUCGCCAAGCACCUG | GCC | CUGCAC | ID NO: |
| | | AIKVIPTVFKAMQMQ | CCCGACCUGAUCGAG | | CCGUAC | 3, and |
| | | ERDTLLKALLEIASC | AGCGGGCAGCUGCGG | | CCCCGU | UTR |
| | | LEKALQVFHQIHDHV | GAACGGGUGGAGAAG | | GGUCUU | sequence |
| | | NPKAFFSVLRIYLSG | CUGAACAUGCUGAGC | | UGAAUA | of SEQ |
| | | WKGNPQLSDGLVYEG | AUCGACCACCUGACC | | AAGUCU | ID NO: |
| | | FWEDPKEFAGGSAGQ | GACCACAAGUCCCAG | | GAGUGG | 141. |
| | | SSVFQCFDVLLGIQQ | CGGUUGGCUCGGCUG | | GCGGC | |
| | | TAGGGHAAQFLQDMR | GUGCUGGGCUGCAUC | | | |
| | | RYMPPAHRNFLCSLE | ACCAUGGCCUACGUG | | | |
| | | SNPSVREFVLSKGDA | UGGGGAAAGGGGCAC | | | |
| | | GLREAYDACVKALVS | GGUGACGUGCGGAAG | | | |
| | | LRSYHLQIVTKYILI | GUGCUGCCCCGCAAC | | | |
| | | PASQQPKENKTSEDP | AUCGCCGUGCCCUAC | | | |
| | | SKLEAKGTGGTDLMN | UGCCAGCUGAGCAAG | | | |
| | | FLKTVRSTTEKSLLK | AAGCUGGAGCUGCCU | | | |
| | | EGGKPIPNPLLGLDS | CCGAUCCUGGUGUAC | | | |
| | | T | GCCGACUGCGUGCUG | | | |
| | | | GCCAACUGGAAGAAG | | | |
| | | | AAGGACCCCAACAAG | | | |
| | | | CCCCUGACCUACGAG | | | |
| | | | AACAUGGACGUGCUG | | | |
| | | | UUCUCCUUCCGGGAC | | | |
| | | | GGGGACUGCAGCAAG | | | |
| | | | GGGUUCUUCCUGGUG | | | |
| | | | AGCCUGCUGGUGGAG | | | |
| | | | AUCGCCGCCGCCUCU | | | |
| | | | GCCAUCAAGGUGAUC | | | |
| | | | CCCACCGUGUUCAAG | | | |
| | | | GCCAUGCAGAUGCAG | | | |
| | | | GAGAGGGACACCCUG | | | |
| | | | CUGAAGGCCCUGCUG | | | |
| | | | GAGAUCGCCAGCUGC | | | |
| | | | CUGGAGAAGGCCCUG | | | |
| | | | CAGGUGUUCCACCAG | | | |
| | | | AUCCACGACCACGUG | | | |
| | | | AACCCCAAGGCCUUC | | | |
| | | | UUCAGCGUGCUGCGC | | | |
| | | | AUCUACCUGUCCGGC | | | |
| | | | UGGAAGGGCAAUCCC | | | |
| | | | CAGCUGAGCGACGGC | | | |
| | | | CUGGUGUACGAGGGC | | | |
| | | | UUCUGGGAGGACCCC | | | |
| | | | AAGGAAUUUGCUGGC | | | |
| | | | GGUAGCGCUGGCCAG | | | |
| | | | UCCAGCGUGUUCCAG | | | |
| | | | UGCUUCGACGUGCUG | | | |
| | | | CUGGGCAUUCAGCAA | | | |
| | | | ACCGCUGGAGGCGGA | | | |
| | | | CACGCUGCCCAGUUC | | | |
| | | | CUGCAGGACAUGCGG | | | |
| | | | CGGUACAUGCCACCG | | | |
| | | | GCCCACCGCAACUUC | | | |
| | | | CUGUGCUCCCUGGAG | | | |
| | | | AGCAACCCCUCCGUG | | | |
| | | | CGGGAGUUCGUGCUG | | | |
| | | | UCCAAGGGCGACGCC | | | |
| | | | GGACUGAGGGAGGCC | | | |
| | | | UACGACGCCUGCGUG | | | |
| | | | AAGGCCCUGGUGUCC | | | |
| | | | CUGCGCAGCUACCAC | | | |
| | | | CUGCAGAUCGUGACC | | | |
| | | | AAGUACAUCCUGAUC | | | |
| | | | CCCGCAAGCCAGCAG | | | |
| | | | CCCAAGGAGAACAAG | | | |
| | | | ACCAGCGAGGACCCC | | | |
| | | | UCCAAGCUGGAAGCU | | | |
| | | | AAGGGCACCGGCGGC | | | |
| | | | ACUGACCUGAUGAAC | | | |
| | | | UUCCUGAAGACCGUG | | | |
| | | | CGGAGCACCACCGAG | | | |
| | | | AAGAGCCUGCUGAAG | | | |
| | | | GAGGGCGGGAAGCCG | | | |
| | | | AUCCCGAAUCCCCUC | | | |
| | | | CUCGGGCUCGACUCG | | | |
| | | | ACG | | | |
| SEQ ID | | | | | | |
| NO: | | 1 | 3 | 50 | 141 | 303 |
| Human | IDO | MGSSKSKPKDPSQRR | AUGGGGUCGUCGAAG | GGAAAU | UAAGCC | SEQ ID |
| IDO1 | G5 | RGGGSAHAMENSWTI | UCGAAGCCGAAAGAU | CGCAAA | CCUCCG | NO: 303 |
| Variant | Cap C1 | SKEYHIDEEVGFALP | CCUAGUCAGCGCAGG | AUUUGC | GGGGCC | comprises |
| 1.4 | A100- | NPQENLPDFYNDWMF | AGGGGAGGAGGAUCC | UCUUCG | UCGGUG | from |
| | A20- | IAKHLPDLIESGQLR | GCCCACGCCAUGGAG | CGUUAG | GCCUAG | 5′ to 3′ |
| | idT nt | ERVEKLNMLSIDHLT | AACAGCUGGACCAUC | AUUUCU | CUUCUU | end: 5′ |
| | (SEQ | DHKSQRLARLVLGCI | AGCAAGGAGUACCAC | UUUAGU | GCCCCU | UTR of |
| | ID NO: | TMAYVWGKGHGDVRK | AUCGACGAGGAGGUG | UUUCUC | UGGGCC | SEQ ID |
| | 709) | VLPRNIAVPYCQLSK | GGCUUCGCCCUGCCC | GCAACU | UCCCCC | NO: 50, |
| | | KLELPPILVYADCVL | AACCCACAGGAGAAC | AGCAAG | CAGCCC | ORF |
| | | ANWKKKDPNKPLTYE | CUGCCCGACUUCUAC | CUUUUU | CUCCUC | sequence |
| | | NMDVLFSFRDGDCSK | AACGACUGGAUGUUC | GUUCUC | CCCUUC | of SEQ |
| | | GFFLVSLLVEIAAAS | AUCGCCAAGCACCUG | GCC | CUGCAC | ID NO: 3, |
| | | AIKVIPTVFKAMQMQ | CCCGACCUGAUCGAG | | CCGUAC | and 3′ |
| | | ERDTLLKALLEIASC | AGCGGGCAGCUGCGG | | CCCCGU | UTR |
| | | LEKALQVFHQIHDHV | GAACGGGUGGAGAAG | | GGUCUU | sequence |
| | | NPKAFFSVLRIYLSG | CUGAACAUGCUGAGC | | UGAAUA | of SEQ |
| | | WKGNPQLSDGLVYEG | AUCGACCACCUGACC | | AAGUCU | ID |
| | | FWEDPKEFAGGSAGQ | GACCACAAGUCCCAG | | GAGUGG | NO: 141. |
| | | SSVFQCFDVLLGIQQ | CGGUUGGCUCGGCUG | | GCGGC | |
| | | TAGGGHAAQFLQDMR | GUGCUGGGCUGCAUC | | | |
| | | RYMPPAHRNFLCSLE | ACCAUGGCCUACGUG | | | |
| | | SNPSVREFVLSKGDA | UGGGGAAAGGGGCAC | | | |
| | | GLREAYDACVKALVS | GGUGACGUGCGGAAG | | | |
| | | LRSYHLQIVTKYILI | GUGCUGCCCCGCAAC | | | |
| | | PASQQPKENKTSEDP | AUCGCCGUGCCCUAC | | | |
| | | SKLEAKGTGGTDLMN | UGCCAGCUGAGCAAG | | | |
| | | FLKTVRSTTEKSLLK | AAGCUGGAGCUGCCU | | | |
| | | EGGKPIPNPLLGLDS | CCGAUCCUGGUGUAC | | | |
| | | T | GCCGACUGCGUGCUG | | | |
| | | | GCCAACUGGAAGAAG | | | |
| | | | AAGGACCCCAACAAG | | | |
| | | | CCCCUGACCUACGAG | | | |
| | | | AACAUGGACGUGCUG | | | |
| | | | UUCUCCUUCCGGGAC | | | |
| | | | GGGGACUGCAGCAAG | | | |
| | | | GGGUUCUUCCUGGUG | | | |
| | | | AGCCUGCUGGUGGAG | | | |
| | | | AUCGCCGCCGCCUCU | | | |
| | | | GCCAUCAAGGUGAUC | | | |
| | | | CCCACCGUGUUCAAG | | | |
| | | | GCCAUGCAGAUGCAG | | | |
| | | | GAGAGGGACACCCUG | | | |
| | | | CUGAAGGCCCUGCUG | | | |
| | | | GAGAUCGCCAGCUGC | | | |
| | | | CUGGAGAAGGCCCUG | | | |
| | | | CAGGUGUUCCACCAG | | | |
| | | | AUCCACGACCACGUG | | | |
| | | | AACCCCAAGGCCUUC | | | |
| | | | UUCAGCGUGCUGCGC | | | |
| | | | AUCUACCUGUCCGGC | | | |
| | | | UGGAAGGGCAAUCCC | | | |
| | | | CAGCUGAGCGACGGC | | | |
| | | | CUGGUGUACGAGGGC | | | |
| | | | UUCUGGGAGGACCCC | | | |
| | | | AAGGAAUUUGCUGGC | | | |
| | | | GGUAGCGCUGGCCAG | | | |
| | | | UCCAGCGUGUUCCAG | | | |
| | | | UGCUUCGACGUGCUG | | | |
| | | | CUGGGCAUUCAGCAA | | | |
| | | | ACCGCUGGAGGCGGA | | | |
| | | | CACGCUGCCCAGUUC | | | |
| | | | CUGCAGGACAUGCGG | | | |
| | | | CGGUACAUGCCACCG | | | |
| | | | GCCCACCGCAACUUC | | | |
| | | | CUGUGCUCCCUGGAG | | | |
| | | | AGCAACCCCUCCGUG | | | |
| | | | CGGGAGUUCGUGCUG | | | |
| | | | UCCAAGGGCGACGCC | | | |
| | | | GGACUGAGGGAGGCC | | | |
| | | | UACGACGCCUGCGUG | | | |
| | | | AAGGCCCUGGUGUCC | | | |
| | | | CUGCGCAGCUACCAC | | | |
| | | | CUGCAGAUCGUGACC | | | |
| | | | AAGUACAUCCUGAUC | | | |
| | | | CCCGCAAGCCAGCAG | | | |
| | | | CCCAAGGAGAACAAG | | | |
| | | | ACCAGCGAGGACCCC | | | |
| | | | UCCAAGCUGGAAGCU | | | |
| | | | AAGGGCACCGGCGGC | | | |
| | | | ACUGACCUGAUGAAC | | | |
| | | | UUCCUGAAGACCGUG | | | |
| | | | CGGAGCACCACCGAG | | | |
| | | | AAGAGCCUGCUGAAG | | | |
| | | | GAGGGCGGGAAGCCG | | | |
| | | | AUCCCGAAUCCCCUC | | | |
| | | | CUCGGGCUCGACUCG | | | |
| | | | ACG | | | |
| SEQ ID | | | | | | |
| NO: | | 1 | 2 | 50 | 141 | 304 |
| Human | IDO | MGSSKSKPKDPSQRR | AUGGGCAGCAGCAAG | GGAAAU | UAAGCC | SEQ ID |
| IDO1 | G5 | RGGGSAHAMENSWTI | AGCAAGCCUAAGGAC | CGCAAA | CCUCCG | NO: 304 |
| Variant | Cap C1 | SKEYHIDEEVGFALP | CCUAGCCAGAGAAGA | AUUUGC | GGGGCC | comprises |
| 1.5 | Poly A | NPQENLPDFYNDWMF | AGAGGCGGAGGCUCC | UCUUCG | UCGGUG | from |
| | tail: | IAKHLPDLIESGQLR | GCCCACGCCAUGGAG | CGUUAG | GCCUAG | 5′ to 3′ |
| | 100 nt | ERVEKLNMLSIDHLT | AACAGCUGGACCAUC | AUUUCU | CUUCUU | end: 5′ |
| | (SEQ ID | DHKSQRLARLVLGCI | AGCAAGGAGUACCAC | UUUAGU | GCCCCU | UTR of |
| | NO: 502) | TMAYVWGKGHGDVRK | AUCGACGAGGAGGUG | UUUCUC | UGGGCC | SEQ ID |
| | | VLPRNIAVPYCQLSK | GGCUUCGCCCUGCCU | GCAACU | UCCCCC | NO: 50, |
| | | KLELPPILVYADCVL | AACCCUCAGGAGAAC | AGCAAG | CAGCCC | ORF |
| | | ANWKKKDPNKPLTYE | CUGCCUGACUUCUAC | CUUUUU | CUCCUC | sequence |
| | | NMDVLFSFRDGDCSK | AACGACUGGAUGUUC | GUUCUC | CCCUUC | of SEQ |
| | | GFFLVSLLVEIAAAS | AUCGCCAAGCACUUG | GCC | CUGCAC | ID NO: 2, |
| | | AIKVIPTVFKAMQMQ | CCGGACCUGAUCGAG | | CCGUAC | and 3′ |
| | | ERDTLLKALLEIASC | AGCGGCCAGCUGAGA | | CCCCGU | UTR |
| | | LEKALQVFHQIHDHV | GAGAGAGUGGAGAAG | | GGUCUU | sequence |
| | | NPKAFFSVLRIYLSG | CUGAACAUGCUGAGC | | UGAAUA | of SEQ |
| | | WKGNPQLSDGLVYEG | AUCGACCACCUGACC | | AAGUCU | ID NO: |
| | | FWEDPKEFAGGSAGQ | GACCACAAGAGCCAG | | GAGUGG | 141. |
| | | SSVFQCFDVLLGIQQ | AGACUGGCCAGACUG | | GCGGC | |
| | | TAGGGHAAQFLQDMR | GUGCUGGGCUGCAUC | | | |
| | | RYMPPAHRNFLCSLE | ACCAUGGCCUACGUG | | | |
| | | SNPSVREFVLSKGDA | UGGGGCAAGGGCCAC | | | |
| | | GLREAYDACVKALVS | GGCGACGUGAGAAAG | | | |
| | | LRSYHLQIVTKYILI | GUGCUGCCUAGAAAC | | | |
| | | PASQQPKENKTSEDP | AUCGCCGUGCCUUAC | | | |
| | | SKLEAKGTGGTDLMN | UGCCAGCUGAGCAAG | | | |
| | | FLKTVRSTTEKSLLK | AAGCUGGAGCUGCCU | | | |
| | | EGGKPIPNPLLGLDS | CCUAUCCUGGUGUAC | | | |
| | | T | GCCGACUGCGUGCUG | | | |
| | | | GCCAACUGGAAGAAG | | | |
| | | | AAGGACCCUAACAAG | | | |
| | | | CCUCUGACCUACGAG | | | |
| | | | AACAUGGACGUGCUG | | | |
| | | | UUCAGCUUCAGAGAC | | | |
| | | | GGCGACUGCAGCAAG | | | |
| | | | GGCUUCUUCCUGGUG | | | |
| | | | AGCCUGCUGGUGGAG | | | |
| | | | AUCGCCGCCGCCAGC | | | |
| | | | GCCAUCAAGGUGAUC | | | |
| | | | CCUACCGUGUUCAAG | | | |
| | | | GCCAUGCAGAUGCAG | | | |
| | | | GAGAGAGACACCCUG | | | |
| | | | CUGAAGGCCCUGUUG | | | |
| | | | GAGAUAGCCAGCUGC | | | |
| | | | CUGGAGAAGGCACUG | | | |
| | | | CAGGUGUUCCACCAG | | | |
| | | | AUCCACGACCACGUG | | | |
| | | | AACCCUAAGGCCUUC | | | |
| | | | UUCAGCGUGCUGAGA | | | |
| | | | AUCUACCUGAGCGGC | | | |
| | | | UGGAAGGGCAACCCU | | | |
| | | | CAGCUGAGCGACGGC | | | |
| | | | CUGGUCUACGAGGGC | | | |
| | | | UUCUGGGAGGACCCU | | | |
| | | | AAGGAGUUCGCUGGC | | | |
| | | | GGCUCUGCCGGCCAG | | | |
| | | | AGCAGCGUGUUCCAG | | | |
| | | | UGCUUCGACGUGCUG | | | |
| | | | CUGGGCAUCCAACAA | | | |
| | | | ACCGCAGGAGGCGGC | | | |
| | | | CACGCUGCACAGUUC | | | |
| | | | CUGCAGGACAUGAGA | | | |
| | | | AGAUACAUGCCUCCU | | | |
| | | | GCCCACAGAAACUUC | | | |
| | | | CUGUGCAGCCUGGAG | | | |
| | | | AGCAACCCUAGCGUG | | | |
| | | | AGAGAGUUCGUGCUG | | | |
| | | | AGCAAGGGCGACGCC | | | |
| | | | GGCCUGAGAGAGGCC | | | |
| | | | UACGACGCCUGCGUU | | | |
| | | | AAGGCCCUUGUGUCU | | | |
| | | | CUGAGAAGCUACCAC | | | |
| | | | CUGCAGAUCGUGACC | | | |
| | | | AAGUACAUCCUGAUC | | | |
| | | | CCUGCCAGCCAGCAG | | | |
| | | | CCUAAGGAGAACAAG | | | |
| | | | ACCAGCGAGGACCCA | | | |
| | | | AGCAAGCUGGAGGCC | | | |
| | | | AAGGGCACCGGCGGC | | | |
| | | | ACCGACCUGAUGAAC | | | |
| | | | UUCCUGAAGACCGUG | | | |
| | | | AGAAGCACCACCGAG | | | |
| | | | AAGUCCCUCCUGAAG | | | |
| | | | GAGGGCGGCAAGCCU | | | |
| | | | AUCCCUAACCCUCUG | | | |
| | | | CUGGGCCUGGACAGC | | | |
| | | | ACC | | | |
| SEQ ID | | | | | | |
| NO: | | 1 | 2 | 50 | 141 | 305 |
| Human | IDO | MGSSKSKPKDPSQRR | AUGGGCAGCAGCAAG | GGAAAU | UAAGCC | SEQ ID |
| IDO1 | G5 | RGGGSAHAMENSWTI | AGCAAGCCUAAGGAC | CGCAAA | CCUCCG | NO: 305 |
| Variant | Cap C1 | SKEYHIDEEVGFALP | CCUAGCCAGAGAAGA | AUUUGC | GGGGCC | comprises |
| 1.6 | A100-A20- | NPQENLPDFYNDWMF | AGAGGCGGAGGCUCC | UCUUCG | UCGGUG | from |
| | idT nt | IAKHLPDLIESGQLR | GCCCACGCCAUGGAG | CGUUAG | GCCUAG | 5′ to 3′ |
| | (SEQ | ERVEKLNMLSIDHLT | AACAGCUGGACCAUC | AUUUCU | CUUCUU | end: 5′ |
| | ID NO: | DHKSQRLARLVLGCI | AGCAAGGAGUACCAC | UUUAGU | GCCCCU | UTR of |
| | 709) | TMAYVWGKGHGDVRK | AUCGACGAGGAGGUG | UUUCUC | UGGGCC | SEQ ID |
| | | VLPRNIAVPYCQLSK | GGCUUCGCCCUGCCU | GCAACU | UCCCCC | NO: 50, |
| | | KLELPPILVYADCVL | AACCCUCAGGAGAAC | AGCAAG | CAGCCC | ORF |
| | | ANWKKKDPNKPLTYE | CUGCCUGACUUCUAC | CUUUUU | CUCCUC | sequence |
| | | NMDVLFSFRDGDCSK | AACGACUGGAUGUUC | GUUCUC | CCCUUC | of SEQ |
| | | GFFLVSLLVEIAAAS | AUCGCCAAGCACUUG | GCC | CUGCAC | ID NO: 2, |
| | | AIKVIPTVFKAMQMQ | CCGGACCUGAUCGAG | | CCGUAC | and 3′ |
| | | ERDTLLKALLEIASC | AGCGGCCAGCUGAGA | | CCCCGU | UTR |
| | | LEKALQVFHQIHDHV | GAGAGAGUGGAGAAG | | GGUCUU | sequence |
| | | NPKAFFSVLRIYLSG | CUGAACAUGCUGAGC | | UGAAUA | of SEQ |
| | | WKGNPQLSDGLVYEG | AUCGACCACCUGACC | | AAGUCU | ID NO: |
| | | FWEDPKEFAGGSAGQ | GACCACAAGAGCCAG | | GAGUGG | 141. |
| | | SSVFQCFDVLLGIQQ | AGACUGGCCAGACUG | | GCGGC | |
| | | TAGGGHAAQFLQDMR | GUGCUGGGCUGCAUC | | | |
| | | RYMPPAHRNFLCSLE | ACCAUGGCCUACGUG | | | |
| | | SNPSVREFVLSKGDA | UGGGGCAAGGGCCAC | | | |
| | | GLREAYDACVKALVS | GGCGACGUGAGAAAG | | | |
| | | LRSYHLQIVTKYILI | GUGCUGCCUAGAAAC | | | |
| | | PASQQPKENKTSEDP | AUCGCCGUGCCUUAC | | | |
| | | SKLEAKGTGGTDLMN | UGCCAGCUGAGCAAG | | | |
| | | FLKTVRSTTEKSLLK | AAGCUGGAGCUGCCU | | | |
| | | EGGKPIPNPLLGLDS | CCUAUCCUGGUGUAC | | | |
| | | T | GCCGACUGCGUGCUG | | | |
| | | | GCCAACUGGAAGAAG | | | |
| | | | AAGGACCCUAACAAG | | | |
| | | | CCUCUGACCUACGAG | | | |
| | | | AACAUGGACGUGCUG | | | |
| | | | UUCAGCUUCAGAGAC | | | |
| | | | GGCGACUGCAGCAAG | | | |
| | | | GGCUUCUUCCUGGUG | | | |
| | | | AGCCUGCUGGUGGAG | | | |
| | | | AUCGCCGCCGCCAGC | | | |
| | | | GCCAUCAAGGUGAUC | | | |
| | | | CCUACCGUGUUCAAG | | | |
| | | | GCCAUGCAGAUGCAG | | | |
| | | | GAGAGAGACACCCUG | | | |
| | | | CUGAAGGCCCUGUUG | | | |
| | | | GAGAUAGCCAGCUGC | | | |
| | | | CUGGAGAAGGCACUG | | | |
| | | | CAGGUGUUCCACCAG | | | |
| | | | AUCCACGACCACGUG | | | |
| | | | AACCCUAAGGCCUUC | | | |
| | | | UUCAGCGUGCUGAGA | | | |
| | | | AUCUACCUGAGCGGC | | | |
| | | | UGGAAGGGCAACCCU | | | |
| | | | CAGCUGAGCGACGGC | | | |
| | | | CUGGUCUACGAGGGC | | | |
| | | | UUCUGGGAGGACCCU | | | |
| | | | AAGGAGUUCGCUGGC | | | |
| | | | GGCUCUGCCGGCCAG | | | |
| | | | AGCAGCGUGUUCCAG | | | |
| | | | UGCUUCGACGUGCUG | | | |
| | | | CUGGGCAUCCAACAA | | | |
| | | | ACCGCAGGAGGCGGC | | | |
| | | | CACGCUGCACAGUUC | | | |
| | | | CUGCAGGACAUGAGA | | | |
| | | | AGAUACAUGCCUCCU | | | |
| | | | GCCCACAGAAACUUC | | | |
| | | | CUGUGCAGCCUGGAG | | | |
| | | | AGCAACCCUAGCGUG | | | |
| | | | AGAGAGUUCGUGCUG | | | |
| | | | AGCAAGGGCGACGCC | | | |
| | | | GGCCUGAGAGAGGCC | | | |
| | | | UACGACGCCUGCGUU | | | |
| | | | AAGGCCCUUGUGUCU | | | |
| | | | CUGAGAAGCUACCAC | | | |
| | | | CUGCAGAUCGUGACC | | | |
| | | | AAGUACAUCCUGAUC | | | |
| | | | CCUGCCAGCCAGCAG | | | |
| | | | CCUAAGGAGAACAAG | | | |
| | | | ACCAGCGAGGACCCA | | | |
| | | | AGCAAGCUGGAGGCC | | | |
| | | | AAGGGCACCGGCGGC | | | |
| | | | ACCGACCUGAUGAAC | | | |
| | | | UUCCUGAAGACCGUG | | | |
| | | | AGAAGCACCACCGAG | | | |
| | | | AAGUCCCUCCUGAAG | | | |
| | | | GAGGGCGGCAAGCCU | | | |
| | | | AUCCCUAACCCUCUG | | | |
| | | | CUGGGCCUGGACAGC | | | |
| | | | ACC | | | |
| SEQ ID | | | | | | |
| NO: | | 1 | 2 | 50 | 108 | 306 |
| Human | IDO | MGSSKSKPKDPSQRR | AUGGGCAGCAGCAAG | GGAAAU | UGAUAA | SEQ ID |
| IDO1 | G5 | RGGGSAHAMENSWTI | AGCAAGCCUAAGGAC | CGCAAA | UAGGCU | NO: 306 |
| Variant | Cap C1 | SKEYHIDEEVGFALP | CCUAGCCAGAGAAGA | AUUUGC | GGAGCC | comprises |
| 1.7 | Poly A | NPQENLPDFYNDWMF | AGAGGCGGAGGCUCC | UCUUCG | UCGGUG | from |
| | tail: | IAKHLPDLIESGQLR | GCCCACGCCAUGGAG | CGUUAG | GCCUAG | 5′ to 3′ |
| | 100 nt | ERVEKLNMLSIDHLT | AACAGCUGGACCAUC | AUUUCU | CUUCUU | end: 5′ |
| | (SEQ ID | DHKSQRLARLVLGCI | AGCAAGGAGUACCAC | UUUAGU | GCCCCU | UTR of |
| | NO: 502) | TMAYVWGKGHGDVRK | AUCGACGAGGAGGUG | UUUCUC | UGGGCC | SEQ ID |
| | | VLPRNIAVPYCQLSK | GGCUUCGCCCUGCCU | GCAACU | UCCCCC | NO: 50, |
| | | KLELPPILVYADCVL | AACCCUCAGGAGAAC | AGCAAG | CAGCCC | ORF |
| | | ANWKKKDPNKPLTYE | CUGCCUGACUUCUAC | CUUUUU | CUCCUC | sequence |
| | | NMDVLFSFRDGDCSK | AACGACUGGAUGUUC | GUUCUC | CCCUUC | of SEQ |
| | | GFFLVSLLVEIAAAS | AUCGCCAAGCACUUG | GCC | CUGCAC | ID NO: 2, |
| | | AIKVIPTVFKAMQMQ | CCGGACCUGAUCGAG | | CCGUAC | and 3′ |
| | | ERDTLLKALLEIASC | AGCGGCCAGCUGAGA | | CCCCGU | UTR |
| | | LEKALQVFHQIHDHV | GAGAGAGUGGAGAAG | | GGUCUU | sequence |
| | | NPKAFFSVLRIYLSG | CUGAACAUGCUGAGC | | UGAAUA | of SEQ |
| | | WKGNPQLSDGLVYEG | AUCGACCACCUGACC | | AAGUCU | ID NO: |
| | | FWEDPKEFAGGSAGQ | GACCACAAGAGCCAG | | GAGUGG | 108. |
| | | SSVFQCFDVLLGIQQ | AGACUGGCCAGACUG | | GCGGC | |
| | | TAGGGHAAQFLQDMR | GUGCUGGGCUGCAUC | | | |
| | | RYMPPAHRNFLCSLE | ACCAUGGCCUACGUG | | | |
| | | SNPSVREFVLSKGDA | UGGGGCAAGGGCCAC | | | |
| | | GLREAYDACVKALVS | GGCGACGUGAGAAAG | | | |
| | | LRSYHLQIVTKYILI | GUGCUGCCUAGAAAC | | | |
| | | PASQQPKENKTSEDP | AUCGCCGUGCCUUAC | | | |
| | | SKLEAKGTGGTDLMN | UGCCAGCUGAGCAAG | | | |
| | | FLKTVRSTTEKSLLK | AAGCUGGAGCUGCCU | | | |
| | | EGGKPIPNPL | CCUAUCCUGGUGUAC | | | |
| | | LGLDST | GCCGACUGCGUGCUG | | | |
| | | | GCCAACUGGAAGAAG | | | |
| | | | AAGGACCCUAACAAG | | | |
| | | | CCUCUGACCUACGAG | | | |
| | | | AACAUGGACGUGCUG | | | |
| | | | UUCAGCUUCAGAGAC | | | |
| | | | GGCGACUGCAGCAAG | | | |
| | | | GGCUUCUUCCUGGUG | | | |
| | | | AGCCUGCUGGUGGAG | | | |
| | | | AUCGCCGCCGCCAGC | | | |
| | | | GCCAUCAAGGUGAUC | | | |
| | | | CCUACCGUGUUCAAG | | | |
| | | | GCCAUGCAGAUGCAG | | | |
| | | | GAGAGAGACACCCUG | | | |
| | | | CUGAAGGCCCUGUUG | | | |
| | | | GAGAUAGCCAGCUGC | | | |
| | | | CUGGAGAAGGCACUG | | | |
| | | | CAGGUGUUCCACCAG | | | |
| | | | AUCCACGACCACGUG | | | |
| | | | AACCCUAAGGCCUUC | | | |
| | | | UUCAGCGUGCUGAGA | | | |
| | | | AUCUACCUGAGCGGC | | | |
| | | | UGGAAGGGCAACCCU | | | |
| | | | CAGCUGAGCGACGGC | | | |
| | | | CUGGUCUACGAGGGC | | | |
| | | | UUCUGGGAGGACCCU | | | |
| | | | AAGGAGUUCGCUGGC | | | |
| | | | GGCUCUGCCGGCCAG | | | |
| | | | AGCAGCGUGUUCCAG | | | |
| | | | UGCUUCGACGUGCUG | | | |
| | | | CUGGGCAUCCAACAA | | | |
| | | | ACCGCAGGAGGCGGC | | | |
| | | | CACGCUGCACAGUUC | | | |
| | | | CUGCAGGACAUGAGA | | | |
| | | | AGAUACAUGCCUCCU | | | |
| | | | GCCCACAGAAACUUC | | | |
| | | | CUGUGCAGCCUGGAG | | | |
| | | | AGCAACCCUAGCGUG | | | |
| | | | AGAGAGUUCGUGCUG | | | |
| | | | AGCAAGGGCGACGCC | | | |
| | | | GGCCUGAGAGAGGCC | | | |
| | | | UACGACGCCUGCGUU | | | |
| | | | AAGGCCCUUGUGUCU | | | |
| | | | CUGAGAAGCUACCAC | | | |
| | | | CUGCAGAUCGUGACC | | | |
| | | | AAGUACAUCCUGAUC | | | |
| | | | CCUGCCAGCCAGCAG | | | |
| | | | CCUAAGGAGAACAAG | | | |
| | | | ACCAGCGAGGACCCA | | | |
| | | | AGCAAGCUGGAGGCC | | | |
| | | | AAGGGCACCGGCGGC | | | |
| | | | ACCGACCUGAUGAAC | | | |
| | | | UUCCUGAAGACCGUG | | | |
| | | | AGAAGCACCACCGAG | | | |
| | | | AAGUCCCUCCUGAAG | | | |
| | | | GAGGGCGGCAAGCCU | | | |
| | | | AUCCCUAACCCUCUG | | | |
| | | | CUGGGCCUGGACAGC | | | |
| | | | ACC | | | |
| SEQ ID | | | | | | |
| NO: | | 1 | 2 | 50 | 140 | 307 |
| Human | IDO | MGSSKSKPKDPSQRR | AUGGGCAGCAGCAAG | GGAAAU | UAAGUC | SEQ ID |
| IDO1 | G5 | RGGGSAHAMENSWTI | AGCAAGCCUAAGGAC | CGCAAA | UCCGCU | NO: 307 |
| Variant | Cap C1 | SKEYHIDEEVGFALP | CCUAGCCAGAGAAGA | AUUUGC | GGAGCC | comprises |
| 1.8 | Poly A | NPQENLPDFYNDWMF | AGAGGCGGAGGCUCC | UCUUCG | UCGGUG | from |
| | tail: | IAKHLPDLIESGQLR | GCCCACGCCAUGGAG | CGUUAG | GCCUAG | 5′ to 3′ |
| | 100 nt | ERVEKLNMLSIDHLT | AACAGCUGGACCAUC | AUUUCU | CUUCUU | end: 5′ |
| | (SEQ ID | DHKSQRLARLVLGCI | AGCAAGGAGUACCAC | UUUAGU | GCCCCU | UTR of |
| | NO: 502) | TMAYVWGKGHGDVRK | AUCGACGAGGAGGUG | UUUCUC | UGGGCC | SEQ ID |
| | | VLPRNIAVPYCQLSK | GGCUUCGCCCUGCCU | GCAACU | UCCCCC | NO: 50, |
| | | KLELPPILVYADCVL | AACCCUCAGGAGAAC | AGCAAG | CAGCCC | ORF |
| | | ANWKKKDPNKPLTYE | CUGCCUGACUUCUAC | CUUUUU | CUCCUC | sequence |
| | | NMDVLFSFRDGDCSK | AACGACUGGAUGUUC | GUUCUC | CCCUUC | of SEQ |
| | | GFFLVSLLVEIAAAS | AUCGCCAAGCACUUG | GCC | CUGCAC | ID NO: 2, |
| | | AIKVIPTVFKAMQMQ | CCGGACCUGAUCGAG | | CCGUAC | and 3′ |
| | | ERDTLLKALLEIASC | AGCGGCCAGCUGAGA | | CCCCGU | UTR |
| | | LEKALQVFHQIHDHV | GAGAGAGUGGAGAAG | | GGUCUU | sequence |
| | | NPKAFFSVLRIYLSG | CUGAACAUGCUGAGC | | UGAAUA | of SEQ |
| | | WKGNPQLSDGLVYEG | AUCGACCACCUGACC | | AAGUCU | ID NO: |
| | | FWEDPKEFAGGSAGQ | GACCACAAGAGCCAG | | GAGUGG | 140. |
| | | SSVFQCFDVLLGIQQ | AGACUGGCCAGACUG | | GCGGC | |
| | | TAGGGHAAQFLQDMR | GUGCUGGGCUGCAUC | | | |
| | | RYMPPAHRNFLCSLE | ACCAUGGCCUACGUG | | | |
| | | SNPSVREFVLSKGDA | UGGGGCAAGGGCCAC | | | |
| | | GLREAYDACVKALVS | GGCGACGUGAGAAAG | | | |
| | | LRSYHLQIVTKYILI | GUGCUGCCUAGAAAC | | | |
| | | PASQQPKENKTSEDP | AUCGCCGUGCCUUAC | | | |
| | | SKLEAKGTGGTDLMN | UGCCAGCUGAGCAAG | | | |
| | | FLKTVRSTTEKSLLK | AAGCUGGAGCUGCCU | | | |
| | | EGGKPIPNPLLGLDS | CCUAUCCUGGUGUAC | | | |
| | | T | GCCGACUGCGUGCUG | | | |
| | | | GCCAACUGGAAGAAG | | | |
| | | | AAGGACCCUAACAAG | | | |
| | | | CCUCUGACCUACGAG | | | |
| | | | AACAUGGACGUGCUG | | | |
| | | | UUCAGCUUCAGAGAC | | | |
| | | | GGCGACUGCAGCAAG | | | |
| | | | GGCUUCUUCCUGGUG | | | |
| | | | AGCCUGCUGGUGGAG | | | |
| | | | AUCGCCGCCGCCAGC | | | |
| | | | GCCAUCAAGGUGAUC | | | |
| | | | CCUACCGUGUUCAAG | | | |
| | | | GCCAUGCAGAUGCAG | | | |
| | | | GAGAGAGACACCCUG | | | |
| | | | CUGAAGGCCCUGUUG | | | |
| | | | GAGAUAGCCAGCUGC | | | |
| | | | CUGGAGAAGGCACUG | | | |
| | | | CAGGUGUUCCACCAG | | | |
| | | | AUCCACGACCACGUG | | | |
| | | | AACCCUAAGGCCUUC | | | |
| | | | UUCAGCGUGCUGAGA | | | |
| | | | AUCUACCUGAGCGGC | | | |
| | | | UGGAAGGGCAACCCU | | | |
| | | | CAGCUGAGCGACGGC | | | |
| | | | CUGGUCUACGAGGGC | | | |
| | | | UUCUGGGAGGACCCU | | | |
| | | | AAGGAGUUCGCUGGC | | | |
| | | | GGCUCUGCCGGCCAG | | | |
| | | | AGCAGCGUGUUCCAG | | | |
| | | | UGCUUCGACGUGCUG | | | |
| | | | CUGGGCAUCCAACAA | | | |
| | | | ACCGCAGGAGGCGGC | | | |
| | | | CACGCUGCACAGUUC | | | |
| | | | CUGCAGGACAUGAGA | | | |
| | | | AGAUACAUGCCUCCU | | | |
| | | | GCCCACAGAAACUUC | | | |
| | | | CUGUGCAGCCUGGAG | | | |
| | | | AGCAACCCUAGCGUG | | | |
| | | | AGAGAGUUCGUGCUG | | | |
| | | | AGCAAGGGCGACGCC | | | |
| | | | GGCCUGAGAGAGGCC | | | |
| | | | UACGACGCCUGCGUU | | | |
| | | | AAGGCCCUUGUGUCU | | | |
| | | | CUGAGAAGCUACCAC | | | |
| | | | CUGCAGAUCGUGACC | | | |
| | | | AAGUACAUCCUGAUC | | | |
| | | | CCUGCCAGCCAGCAG | | | |
| | | | CCUAAGGAGAACAAG | | | |
| | | | ACCAGCGAGGACCCA | | | |
| | | | AGCAAGCUGGAGGCC | | | |
| | | | AAGGGCACCGGCGGC | | | |
| | | | ACCGACCUGAUGAAC | | | |
| | | | UUCCUGAAGACCGUG | | | |
| | | | AGAAGCACCACCGAG | | | |
| | | | AAGUCCCUCCUGAAG | | | |
| | | | GAGGGCGGCAAGCCU | | | |
| | | | AUCCCUAACCCUCUG | | | |
| | | | CUGGGCCUGGACAGC | | | |
| | | | ACC | | | |
| SEQ ID | | | | | | |
| NO: | | 1 | 3 | 50 | 108 | 308 |
| Human | IDO | MGSSKSKPKDPSQRR | AUGGGGUCGUCGAAG | GGAAAU | UGAUAA | SEQ ID |
| IDO1 | G5 | RGGGSAHAMENSWTI | UCGAAGCCGAAAGAU | CGCAAA | UAGGCU | NO: 308 |
| Variant | Cap C1 | SKEYHIDEEVGFALP | CCUAGUCAGCGCAGG | AUUUGC | GGAGCC | comprises |
| 1.9 | Poly A | NPQENLPDFYNDWMF | AGGGGAGGAGGAUCC | UCUUCG | UCGGUG | from |
| | tail: | IAKHLPDLIESGQLR | GCCCACGCCAUGGAG | CGUUAG | GCCUAG | 5′ to 3′ |
| | 100 nt | ERVEKLNMLSIDHLT | AACAGCUGGACCAUC | AUUUCU | CUUCUU | end: 5′ |
| | (SEQ ID | DHKSQRLARLVLGCI | AGCAAGGAGUACCAC | UUUAGU | GCCCCU | UTR of |
| | NO: 502) | TMAYVWGKGHGDVRK | AUCGACGAGGAGGUG | UUUCUC | UGGGCC | SEQ ID |
| | | VLPRNIAVPYCQLSK | GGCUUCGCCCUGCCC | GCAACU | UCCCCC | NO: 50, |
| | | KLELPPILVYADCVL | AACCCACAGGAGAAC | AGCAAG | CAGCCC | ORF |
| | | ANWKKKDPNKPLTYE | CUGCCCGACUUCUAC | CUUUUU | CUCCUC | sequence |
| | | NMDVLFSFRDGDCSK | AACGACUGGAUGUUC | GUUCUC | CCCUUC | of SEQ |
| | | GFFLVSLLVEIAAAS | AUCGCCAAGCACCUG | GCC | CUGCAC | ID NO: 3, |
| | | AIKVIPTVFKAMQMQ | CCCGACCUGAUCGAG | | CCGUAC | and 3′ |
| | | ERDTLLKALLEIASC | AGCGGGCAGCUGCGG | | CCCCGU | UTR |
| | | LEKALQVFHQIHDHV | GAACGGGUGGAGAAG | | GGUCUU | sequence |
| | | NPKAFFSVLRIYLSG | CUGAACAUGCUGAGC | | UGAAUA | of SEQ |
| | | WKGNPQLSDGLVYEG | AUCGACCACCUGACC | | AAGUCU | ID NO: |
| | | FWEDPKEFAGGSAGQ | GACCACAAGUCCCAG | | GAGUGG | 108. |
| | | SSVFQCFDVLLGIQQ | CGGUUGGCUCGGCUG | | GCGGC | |
| | | TAGGGHAAQFLQDMR | GUGCUGGGCUGCAUC | | | |
| | | RYMPPAHRNFLCSLE | ACCAUGGCCUACGUG | | | |
| | | SNPSVREFVLSKGDA | UGGGGAAAGGGGCAC | | | |
| | | GLREAYDACVKALVS | GGUGACGUGCGGAAG | | | |
| | | LRSYHLQIVTKYILI | GUGCUGCCCCGCAAC | | | |
| | | PASQQPKENKTSEDP | AUCGCCGUGCCCUAC | | | |
| | | SKLEAKGTGGTDLMN | UGCCAGCUGAGCAAG | | | |
| | | FLKTVRSTTEKSLLK | AAGCUGGAGCUGCCU | | | |
| | | EGGKPIPNPLLGLDS | CCGAUCCUGGUGUAC | | | |
| | | T | GCCGACUGCGUGCUG | | | |
| | | | GCCAACUGGAAGAAG | | | |
| | | | AAGGACCCCAACAAG | | | |
| | | | CCCCUGACCUACGAG | | | |
| | | | AACAUGGACGUGCUG | | | |
| | | | UUCUCCUUCCGGGAC | | | |
| | | | GGGGACUGCAGCAAG | | | |
| | | | GGGUUCUUCCUGGUG | | | |
| | | | AGCCUGCUGGUGGAG | | | |
| | | | AUCGCCGCCGCCUCU | | | |
| | | | GCCAUCAAGGUGAUC | | | |
| | | | CCCACCGUGUUCAAG | | | |
| | | | GCCAUGCAGAUGCAG | | | |
| | | | GAGAGGGACACCCUG | | | |
| | | | CUGAAGGCCCUGCUG | | | |
| | | | GAGAUCGCCAGCUGC | | | |
| | | | CUGGAGAAGGCCCUG | | | |
| | | | CAGGUGUUCCACCAG | | | |
| | | | AUCCACGACCACGUG | | | |
| | | | AACCCCAAGGCCUUC | | | |
| | | | UUCAGCGUGCUGCGC | | | |
| | | | AUCUACCUGUCCGGC | | | |
| | | | UGGAAGGGCAAUCCC | | | |
| | | | CAGCUGAGCGACGGC | | | |
| | | | CUGGUGUACGAGGGC | | | |
| | | | UUCUGGGAGGACCCC | | | |
| | | | AAGGAAUUUGCUGGC | | | |
| | | | GGUAGCGCUGGCCAG | | | |
| | | | UCCAGCGUGUUCCAG | | | |
| | | | UGCUUCGACGUGCUG | | | |
| | | | CUGGGCAUUCAGCAA | | | |
| | | | ACCGCUGGAGGCGGA | | | |
| | | | CACGCUGCCCAGUUC | | | |
| | | | CUGCAGGACAUGCGG | | | |
| | | | CGGUACAUGCCACCG | | | |
| | | | GCCCACCGCAACUUC | | | |
| | | | CUGUGCUCCCUGGAG | | | |
| | | | AGCAACCCCUCCGUG | | | |
| | | | CGGGAGUUCGUGCUG | | | |
| | | | UCCAAGGGCGACGCC | | | |
| | | | GGACUGAGGGAGGCC | | | |
| | | | UACGACGCCUGCGUG | | | |
| | | | AAGGCCCUGGUGUCC | | | |
| | | | CUGCGCAGCUACCAC | | | |
| | | | CUGCAGAUCGUGACC | | | |
| | | | AAGUACAUCCUGAUC | | | |
| | | | CCCGCAAGCCAGCAG | | | |
| | | | CCCAAGGAGAACAAG | | | |
| | | | ACCAGCGAGGACCCC | | | |
| | | | UCCAAGCUGGAAGCU | | | |
| | | | AAGGGCACCGGCGGC | | | |
| | | | ACUGACCUGAUGAAC | | | |
| | | | UUCCUGAAGACCGUG | | | |
| | | | CGGAGCACCACCGAG | | | |
| | | | AAGAGCCUGCUGAAG | | | |
| | | | GAGGGCGGGAAGCCG | | | |
| | | | AUCCCGAAUCCCCUC | | | |
| | | | CUCGGGCUCGACUCG | | | |
| | | | ACG | | | |
| SEQ ID | | | | | | |
| NO: | | 1 | 3 | 50 | 100 | 309 |
| Human | IDO | MGSSKSKPKDPSQRR | AUGGGGUCGUCGAAG | GGAAAU | UAAUAG | SEQ ID |
| IDO1 | G5 | RGGGSAHAMENSWTI | UCGAAGCCGAAAGAU | CGCAAA | UAAGCU | NO: 309 |
| Variant | Cap C1 | SKEYHIDEEVGFALP | CCUAGUCAGCGCAGG | AUUUGC | GGAGCC | comprises |
| 1.10 | Poly A | NPQENLPDFYNDWMF | AGGGGAGGAGGAUCC | UCUUCG | UCCUGA | from |
| | tail: | IAKHLPDLIESGQLR | GCCCACGCCAUGGAG | CGUUAG | GAGACC | 5′ to 3′ |
| | 100 nt | ERVEKLNMLSIDHLT | AACAGCUGGACCAUC | AUUUCU | UGUGUG | end: 5′ |
| | (SEQ ID | DHKSQRLARLVLGCI | AGCAAGGAGUACCAC | UUUAGU | AACUAU | UTR of |
| | NO: 502) | TMAYVWGKGHGDVRK | AUCGACGAGGAGGUG | UUUCUC | UGAGAA | SEQ ID |
| | | VLPRNIAVPYCQLSK | GGCUUCGCCCUGCCC | GCAACU | GAUCGG | NO: 50, |
| | | KLELPPILVYADCVL | AACCCACAGGAGAAC | AGCAAG | AACAGC | ORF |
| | | ANWKKKDPNKPLTYE | CUGCCCGACUUCUAC | CUUUUU | UCCUUA | sequence |
| | | NMDVLFSFRDGDCSK | AACGACUGGAUGUUC | GUUCUC | CUCUGA | of SEQ |
| | | GFFLVSLLVEIAAAS | AUCGCCAAGCACCUG | GCC | GGAAGU | ID NO: 3, |
| | | AIKVIPTVFKAMQMQ | CCCGACCUGAUCGAG | | UGGUAC | and 3′ |
| | | ERDTLLKALLEIASC | AGCGGGCAGCUGCGG | | CCCCGU | UTR |
| | | LEKALQVFHQIHDHV | GAACGGGUGGAGAAG | | GGUCUU | sequence |
| | | NPKAFFSVLRIYLSG | CUGAACAUGCUGAGC | | UGAAUA | of SEQ |
| | | WKGNPQLSDGLVYEG | AUCGACCACCUGACC | | AAGUCU | ID NO: |
| | | FWEDPKEFAGGSAGQ | GACCACAAGUCCCAG | | GAGUGG | 100. |
| | | SSVFQCFDVLLGIQQ | CGGUUGGCUCGGCUG | | GCGGC | |
| | | TAGGGHAAQFLQDMR | GUGCUGGGCUGCAUC | | | |
| | | RYMPPAHRNFLCSLE | ACCAUGGCCUACGUG | | | |
| | | SNPSVREFVLSKGDA | UGGGGAAAGGGGCAC | | | |
| | | GLREAYDACVKALVS | GGUGACGUGCGGAAG | | | |
| | | LRSYHLQIVTKYILI | GUGCUGCCCCGCAAC | | | |
| | | PASQQPKENKTSEDP | AUCGCCGUGCCCUAC | | | |
| | | SKLEAKGTGGTDLMN | UGCCAGCUGAGCAAG | | | |
| | | FLKTVRSTTEKSLLK | AAGCUGGAGCUGCCU | | | |
| | | EGGKPIPNPLLGLDS | CCGAUCCUGGUGUAC | | | |
| | | T | GCCGACUGCGUGCUG | | | |
| | | | GCCAACUGGAAGAAG | | | |
| | | | AAGGACCCCAACAAG | | | |
| | | | CCCCUGACCUACGAG | | | |
| | | | AACAUGGACGUGCUG | | | |
| | | | UUCUCCUUCCGGGAC | | | |
| | | | GGGGACUGCAGCAAG | | | |
| | | | GGGUUCUUCCUGGUA | | | |
| | | | GCCUGCUGGUGGAGA | | | |
| | | | UCGCCGCCGCCUCUG | | | |
| | | | CCAUCAAGGUGAUCC | | | |
| | | | CCACCGUGUUCAAGG | | | |
| | | | CCAUGCAGAUGCAGG | | | |
| | | | AGAGGGACACCCUGC | | | |
| | | | UGAAGGCCCUGCUGG | | | |
| | | | AGAUCGCCAGCUGCC | | | |
| | | | UGGAGAAGGCCCUGC | | | |
| | | | AGGUGUUCCACCAGA | | | |
| | | | UCCACGACCACGUGA | | | |
| | | | ACCCCAAGGCCUUCU | | | |
| | | | UCAGCGUGCUGCGCA | | | |
| | | | UCUACCUGUCCGGCU | | | |
| | | | GGAAGGGCAAUCCCC | | | |
| | | | AGCUGAGCGACGGCC | | | |
| | | | UGGUGUACGAGGGCU | | | |
| | | | UCUGGGAGGACCCCA | | | |
| | | | AGGAAUUUGCUGGCG | | | |
| | | | GUAGCGCUGGCCAGU | | | |
| | | | CCAGCGUGUUCCAGU | | | |
| | | | GCUUCGACGUGCUGC | | | |
| | | | UGGGCAUUCAGCAAA | | | |
| | | | CCGCUGGAGGCGGAC | | | |
| | | | ACGCUGCCCAGUUCC | | | |
| | | | UGCAGGACAUGCGGC | | | |
| | | | GGUACAUGCCACCGG | | | |
| | | | CCCACCGCAACUUCC | | | |
| | | | UGUGCUCCCUGGAGA | | | |
| | | | GCAACCCCUCCGUGC | | | |
| | | | GGGAGUUCGUGCUGU | | | |
| | | | CCAAGGGCGACGCCG | | | |
| | | | GACUGAGGGAGGCCU | | | |
| | | | ACGACGCCUGCGUGA | | | |
| | | | AGGCCCUGGUGUCCC | | | |
| | | | UGCGCAGCUACCACC | | | |
| | | | UGCAGAUCGUGACCA | | | |
| | | | AGUACAUCCUGAUCC | | | |
| | | | CCGCAAGCCAGCAGC | | | |
| | | | CCAAGGAGAACAAGA | | | |
| | | | CCAGCGAGGACCCCU | | | |
| | | | CCAAGCUGGAAGCUA | | | |
| | | | AGGGCACCGGCGGCA | | | |
| | | | CUGACCUGAUGAACU | | | |
| | | | UCCUGAAGACCGUGC | | | |
| | | | GGAGCACCACCGAGA | | | |
| | | | AGAGCCUGCUGAAGG | | | |
| | | | AGGGCGGGAAGCCGA | | | |
| | | | UCCCGAAUCCCCUCC | | | |
| | | | UCGGGCUCGACUCGA | | | |
| | | | CG | | | |
| SEQ ID | | | | | | |
| NO: | | 1 | 24 | 50 | 108 | 310 |
| | IDO | MGSSKSKPKDPSQRR | AUGGGAUCUUCUAAA | GGAAAU | UGAUAA | SEQ ID |
| Human | G5 | RGGGSAHAMENSWTI | UCUAAACCUAAAGAU | CGCAAA | UAGGCU | NO: 310 |
| IDO1 | Cap C1 | SKEYHIDEEVGFALP | CCUUCUCAAAGAAGA | AUUUGC | GGAGCC | comprises |
| Variant | Poly A | NPQENLPDFYNDWMF | AGAGGAGGAGGAUCU | UCUUCG | UCGGUG | from |
| 1.11 | tail: | IAKHLPDLIESGQLR | GCUCAUGCUAUGGAG | CGUUAG | GCCUAG | 5′ to 3′ |
| | 100 nt | ERVEKLNMLSIDHLT | AAUUCUUGGACAAUU | AUUUCU | CUUCUU | end: 5′ |
| | (SEQ ID | DHKSQRLARLVLGCI | UCUAAAGAAUAUCAU | UUUAGU | GCCCCU | UTR of |
| | NO: 502) | TMAYVWGKGHGDVRK | AUUGAUGAAGAAGUU | UUUCUC | UGGGCC | SEQ ID |
| | | VLPRNIAVPYCQLSK | GGAUUUGCUCUUCCC | GCAACU | UCCCCC | NO: 50, |
| | | KLELPPILVYADCVL | AACCCACAGGAGAAC | AGCAAG | CAGCCC | ORF |
| | | ANWKKKDPNKPLTYE | CUGCCCGACUUCUAC | CUUUUU | CUCCUC | sequence |
| | | NMDVLFSFRDGDCSK | AACGACUGGAUGUUC | GUUCUC | CCCUUC | of SEQ |
| | | GFFLVSLLVEIAAAS | AUCGCCAAGCACCUG | GCC | CUGCAC | ID |
| | | AIKVIPTVFKAMQMQ | CCCGACCUGAUCGAG | | CCGUAC | NO: 24, |
| | | ERDTLLKALLEIASC | AGCGGGCAGCUGCGG | | CCCCGU | and 3′ |
| | | LEKALQVFHQIHDHV | GAACGGGUGGAGAAG | | GGUCUU | UTR |
| | | NPKAFFSVLRIYLSG | CUGAACAUGCUGAGC | | UGAAUA | sequence |
| | | WKGNPQLSDGLVYEG | AUCGACCACCUGACC | | AAGUCU | of SEQ |
| | | FWEDPKEFAGGSAGQ | GACCACAAGUCCCAG | | GAGUGG | ID NO: |
| | | SSVFQCFDVLLGIQQ | CGGUUGGCUCGGCUG | | GCGGC | 108. |
| | | TAGGGHAAQFLQDMR | GUGCUGGGCUGCAUC | | | |
| | | RYMPPAHRNFLCSLE | ACCAUGGCCUACGUG | | | |
| | | SNPSVREFVLSKGDA | UGGGGAAAGGGGCAC | | | |
| | | GLREAYDACVKALVS | GGUGACGUGCGGAAG | | | |
| | | LRSYHLQIVTKYILI | GUGCUGCCCCGCAAC | | | |
| | | PASQQPKENKTSEDP | AUCGCCGUGCCCUAC | | | |
| | | SKLEAKGTGGTDLMN | UGCCAGCUGAGCAAG | | | |
| | | FLKTVRSTTEKSLLK | AAGCUGGAGCUGCCU | | | |
| | | EGGKPIPNPLLGLDS | CCGAUCCUGGUGUAC | | | |
| | | T | GCCGACUGCGUGCUG | | | |
| | | | GCCAACUGGAAGAAG | | | |
| | | | AAGGACCCCAACAAG | | | |
| | | | CCCCUGACCUACGAG | | | |
| | | | AACAUGGACGUGCUG | | | |
| | | | UUCUCCUUCCGGGAC | | | |
| | | | GGGGACUGCAGCAAG | | | |
| | | | GGGUUCUUCCUGGUG | | | |
| | | | AGCCUGCUGGUGGAG | | | |
| | | | AUCGCCGCCGCCUCU | | | |
| | | | GCCAUCAAGGUGAUC | | | |
| | | | CCCACCGUGUUCAAG | | | |
| | | | GCCAUGCAGAUGCAG | | | |
| | | | GAGAGGGACACCCUG | | | |
| | | | CUGAAGGCCCUGCUG | | | |
| | | | GAGAUCGCCAGCUGC | | | |
| | | | CUGGAGAAGGCCCUG | | | |
| | | | CAGGUGUUCCACCAG | | | |
| | | | AUCCACGACCACGUG | | | |
| | | | AACCCCAAGGCCUUC | | | |
| | | | UUCAGCGUGCUGCGC | | | |
| | | | AUCUACCUGUCCGGC | | | |
| | | | UGGAAGGGCAAUCCC | | | |
| | | | CAGCUGAGCGACGGC | | | |
| | | | CUGGUGUACGAGGGC | | | |
| | | | UUCUGGGAGGACCCC | | | |
| | | | AAGGAAUUUGCUGGC | | | |
| | | | GGUAGCGCUGGCCAG | | | |
| | | | UCCAGCGUGUUCCAG | | | |
| | | | UGCUUCGACGUGCUG | | | |
| | | | CUGGGCAUUCAGCAA | | | |
| | | | ACCGCUGGAGGCGGA | | | |
| | | | CACGCUGCCCAGUUC | | | |
| | | | CUGCAGGACAUGCGG | | | |
| | | | CGGUACAUGCCACCG | | | |
| | | | GCCCACCGCAACUUC | | | |
| | | | CUGUGCUCCCUGGAG | | | |
| | | | AGCAACCCCUCCGUG | | | |
| | | | CGGGAGUUCGUGCUG | | | |
| | | | UCCAAGGGCGACGCC | | | |
| | | | GGACUGAGGGAGGCC | | | |
| | | | UACGACGCCUGCGUG | | | |
| | | | AAGGCCCUGGUGUCC | | | |
| | | | CUGCGCAGCUACCAC | | | |
| | | | CUGCAGAUCGUGACC | | | |
| | | | AAGUACAUCCUGAUC | | | |
| | | | CCCGCAAGCCAGCAG | | | |
| | | | CCCAAGGAGAACAAG | | | |
| | | | ACCAGCGAGGACCCC | | | |
| | | | UCCAAGCUGGAAGCU | | | |
| | | | AAGGGCACCGGCGGC | | | |
| | | | ACUGACCUGAUGAAC | | | |
| | | | UUCCUGAAGACCGUG | | | |
| | | | CGGAGCACCACCGAG | | | |
| | | | AAGAGCCUGCUGAAG | | | |
| | | | GAGGGCGGGAAGCCG | | | |
| | | | AUCCCGAAUCCCCUC | | | |
| | | | CUCGGGCUCGACUCG | | | |
| | | | ACG | | | |
| SEQ ID | | | | | | |
| NO: | | 4 | 5 | 50 | 140 | 311 |
| Human | IDO | MGSSKSKPKDPSQRR | AUGGGGUCGUCGAAG | GGAAAU | UAAGUC | SEQ ID |
| IDO1 | G5 | RGGGSAHAMENSWTI | UCGAAGCCGAAAGAU | CGCAAA | UCCGCU | NO: 311 |
| Variant | Cap C1 | SKEYHIDEEVGFALP | CCUAGUCAGCGCAGG | AUUUGC | GGAGCC | comprises |
| 2.1 | Poly A | NPQENLPDFYNDWMF | AGGGGAGGAGGAUCC | UCUUCG | UCGGUG | from |
| | tail: | IAKHLPDLIESGQLR | GCCCACGCCAUGGAG | CGUUAG | GCCUAG | 5′ to 3′ |
| | 100 nt | ERVEKLNMLSIDHLT | AACAGCUGGACCAUC | AUUUCU | CUUCUU | end: 5′ |
| | (SEQ ID | DHKSQRLARLVLGCI | AGCAAGGAGUACCAC | UUUAGU | GCCCCU | UTR of |
| | NO: 502) | TMAYVWGKGHGDVRK | AUCGACGAGGAGGUG | UUUCUC | UGGGCC | SEQ ID |
| | | VLPRNIAVPYCQLSK | GGCUUCGCCCUGCCC | GCAACU | UCCCCC | NO: 50, |
| | | KLELPPILVYADCVL | AACCCACAGGAGAAC | AGCAAG | CAGCCC | ORF |
| | | ANWKKKDPNKPLTYE | CUGCCCGACUUCUAC | CUUUUU | CUCCUC | sequence |
| | | NMDVLFSFRDGDCSK | AACGACUGGAUGUUC | GUUCUC | CCCUUC | of SEQ |
| | | GFFLVSLLVEIAAAS | AUCGCCAAGCACCUG | GCC | CUGCAC | ID NO: |
| | | AIKVIPTVFKAMQMQ | CCCGACCUGAUCGAG | | CCGUAC | 5, and |
| | | ERDTLLKALLEIASC | AGCGGGCAGCUGCGG | | CCCCGU | 3′ UTR |
| | | LEKALQVFHQIHDHV | GAACGGGUGGAGAAG | | GGUCUU | sequence |
| | | NPKAFFSVLRIYLSG | CUGAACAUGCUGAGC | | UGAAUA | of SEQ |
| | | WKGNPQLSDGLVYEG | AUCGACCACCUGACC | | AAGUCU | ID NO: |
| | | FWEDPKEFAGGSAGQ | GACCACAAGUCCCAG | | GAGUGG | 140. |
| | | SSVFQCFDVLLGIQQ | CGGUUGGCUCGGCUG | | GCGGC | |
| | | TAGGGHAAQFLQDMR | GUGCUGGGCUGCAUC | | | |
| | | RYMPPAHRNFLCSLE | ACCAUGGCCUACGUG | | | |
| | | SNPSVREFVLSKGDA | UGGGGAAAGGGGCAC | | | |
| | | GLREAYDACVKALVS | GGUGACGUGCGGAAG | | | |
| | | LRSYHLQIVTKYILI | GUGCUGCCCCGCAAC | | | |
| | | PASQQPKENKTSEDP | AUCGCCGUGCCCUAC | | | |
| | | SKLEAKGTGGTDLMN | UGCCAGCUGAGCAAG | | | |
| | | FLKTVRSTTEKSLLK | AAGCUGGAGCUGCCU | | | |
| | | EG | CCGAUCCUGGUGUAC | | | |
| | | | GCCGACUGCGUGCUG | | | |
| | | | GCCAACUGGAAGAAG | | | |
| | | | AAGGACCCCAACAAG | | | |
| | | | CCCCUGACCUACGAG | | | |
| | | | AACAUGGACGUGCUG | | | |
| | | | UUCUCCUUCCGGGAC | | | |
| | | | GGGGACUGCAGCAAG | | | |
| | | | GGGUUCUUCCUGGUG | | | |
| | | | AGCCUGCUGGUGGAG | | | |
| | | | AUCGCCGCCGCCUCU | | | |
| | | | GCCAUCAAGGUGAUC | | | |
| | | | CCCACCGUGUUCAAG | | | |
| | | | GCCAUGCAGAUGCAG | | | |
| | | | GAGAGGGACACCCUG | | | |
| | | | CUGAAGGCCCUGCUG | | | |
| | | | GAGAUCGCCAGCUGC | | | |
| | | | CUGGAGAAGGCCCUG | | | |
| | | | CAGGUGUUCCACCAG | | | |
| | | | AUCCACGACCACGUG | | | |
| | | | AACCCCAAGGCCUUC | | | |
| | | | UUCAGCGUGCUGCGC | | | |
| | | | AUCUACCUGUCCGGC | | | |
| | | | UGGAAGGGCAAUCCC | | | |
| | | | CAGCUGAGCGACGGC | | | |
| | | | CUGGUGUACGAGGGC | | | |
| | | | UUCUGGGAGGACCCC | | | |
| | | | AAGGAAUUUGCUGGC | | | |
| | | | GGUAGCGCUGGCCAG | | | |
| | | | UCCAGCGUGUUCCAG | | | |
| | | | UGCUUCGACGUGCUG | | | |
| | | | CUGGGCAUUCAGCAA | | | |
| | | | ACCGCUGGAGGCGGA | | | |
| | | | CACGCUGCCCAGUUC | | | |
| | | | CUGCAGGACAUGCGG | | | |
| | | | CGGUACAUGCCACCG | | | |
| | | | GCCCACCGCAACUUC | | | |
| | | | CUGUGCUCCCUGGAG | | | |
| | | | AGCAACCCCUCCGUG | | | |
| | | | CGGGAGUUCGUGCUG | | | |
| | | | UCCAAGGGCGACGCC | | | |
| | | | GGACUGAGGGAGGCC | | | |
| | | | UACGACGCCUGCGUG | | | |
| | | | AAGGCCCUGGUGUCC | | | |
| | | | CUGCGCAGCUACCAC | | | |
| | | | CUGCAGAUCGUGACC | | | |
| | | | AAGUACAUCCUGAUC | | | |
| | | | CCCGCAAGCCAGCAG | | | |
| | | | CCCAAGGAGAACAAG | | | |
| | | | ACCAGCGAGGACCCC | | | |
| | | | UCCAAGCUGGAAGCU | | | |
| | | | AAGGGCACCGGCGGC | | | |
| | | | ACUGACCUGAUGAAC | | | |
| | | | UUCCUGAAGACCGUG | | | |
| | | | CGGAGCACCACCGAG | | | |
| | | | AAGAGCCUGCUGAAG | | | |
| | | | GAGGGC | | | |
| SEQ ID | | | | | | |
| NO: | | 4 | 5 | 50 | 141 | 312 |
| Human | IDO | MGSSKSKPKDPSQRR | AUGGGGUCGUCGAAG | GGAAAU | UAAGCC | SEQ ID |
| IDO1 | G5 | RGGGSAHAMENSWTI | UCGAAGCCGAAAGAU | CGCAAA | CCUCCG | NO: 312 |
| Variant | Cap C1 | SKEYHIDEEVGFALP | CCUAGUCAGCGCAGG | AUUUGC | GGGGCC | comprises |
| 2.2 | Poly A | NPQENLPDFYNDWMF | AGGGGAGGAGGAUCC | UCUUCG | UCGGUG | from |
| | tail: | IAKHLPDLIESGQLR | GCCCACGCCAUGGAG | CGUUAG | GCCUAG | 5′ to 3′ |
| | 100 nt | ERVEKLNMLSIDHLT | AACAGCUGGACCAUC | AUUUCU | CUUCUU | end: 5′ |
| | (SEQ ID | DHKSQRLARLVLGCI | AGCAAGGAGUACCAC | UUUAGU | GCCCCU | UTR of |
| | NO: 502) | TMAYVWGKGHGDVRK | AUCGACGAGGAGGUG | UUUCUC | UGGGCC | SEQ ID |
| | | VLPRNIAVPYCQLSK | GGCUUCGCCCUGCCC | GCAACU | UCCCCC | NO: 50, |
| | | KLELPPILVYADCVL | AACCCACAGGAGAAC | AGCAAG | CAGCCC | ORF |
| | | ANWKKKDPNKPLTYE | CUGCCCGACUUCUAC | CUUUUU | CUCCUC | sequence |
| | | NMDVLFSFRDGDCSK | AACGACUGGAUGUUC | GUUCUC | CCCUUC | of SEQ |
| | | GFFLVSLLVEIAAAS | AUCGCCAAGCACCUG | GCC | CUGCAC | ID NO: |
| | | AIKVIPTVFKAMQMQ | CCCGACCUGAUCGAG | | CCGUAC | 5, and |
| | | ERDTLLKALLEIASC | AGCGGGCAGCUGCGG | | CCCCGU | 3′ UTR |
| | | LEKALQVFHQIHDHV | GAACGGGUGGAGAAG | | GGUCUU | sequence |
| | | NPKAFFSVLRIYLSG | CUGAACAUGCUGAGC | | UGAAUA | of SEQ |
| | | WKGNPQLSDGLVYEG | AUCGACCACCUGACC | | AAGUCU | ID NO: |
| | | FWEDPKEFAGGSAGQ | GACCACAAGUCCCAG | | GAGUGG | 141. |
| | | SSVFQCFDVLLGIQQ | CGGUUGGCUCGGCUG | | GCGGC | |
| | | TAGGGHAAQFLQDMR | GUGCUGGGCUGCAUC | | | |
| | | RYMPPAHRNFLCSLE | ACCAUGGCCUACGUG | | | |
| | | SNPSVREFVLSKGDA | UGGGGAAAGGGGCAC | | | |
| | | GLREAYDACVKALVS | GGUGACGUGCGGAAG | | | |
| | | LRSYHLQIVTKYILI | GUGCUGCCCCGCAAC | | | |
| | | PASQQPKENKTSEDP | AUCGCCGUGCCCUAC | | | |
| | | SKLEAKGTGGTDLMN | UGCCAGCUGAGCAAG | | | |
| | | FLKTVRSTTEKSLLK | AAGCUGGAGCUGCCU | | | |
| | | EG | CCGAUCCUGGUGUAC | | | |
| | | | GCCGACUGCGUGCUG | | | |
| | | | GCCAACUGGAAGAAG | | | |
| | | | AAGGACCCCAACAAG | | | |
| | | | CCCCUGACCUACGAG | | | |
| | | | AACAUGGACGUGCUG | | | |
| | | | UUCUCCUUCCGGGAC | | | |
| | | | GGGGACUGCAGCAAG | | | |
| | | | GGGUUCUUCCUGGUG | | | |
| | | | AGCCUGCUGGUGGAG | | | |
| | | | AUCGCCGCCGCCUCU | | | |
| | | | GCCAUCAAGGUGAUC | | | |
| | | | CCCACCGUGUUCAAG | | | |
| | | | GCCAUGCAGAUGCAG | | | |
| | | | GAGAGGGACACCCUG | | | |
| | | | CUGAAGGCCCUGCUG | | | |
| | | | GAGAUCGCCAGCUGC | | | |
| | | | CUGGAGAAGGCCCUG | | | |
| | | | CAGGUGUUCCACCAG | | | |
| | | | AUCCACGACCACGUG | | | |
| | | | AACCCCAAGGCCUUC | | | |
| | | | UUCAGCGUGCUGCGC | | | |
| | | | AUCUACCUGUCCGGC | | | |
| | | | UGGAAGGGCAAUCCC | | | |
| | | | CAGCUGAGCGACGGC | | | |
| | | | CUGGUGUACGAGGGC | | | |
| | | | UUCUGGGAGGACCCC | | | |
| | | | AAGGAAUUUGCUGGC | | | |
| | | | GGUAGCGCUGGCCAG | | | |
| | | | UCCAGCGUGUUCCAG | | | |
| | | | UGCUUCGACGUGCUG | | | |
| | | | CUGGGCAUUCAGCAA | | | |
| | | | ACCGCUGGAGGCGGA | | | |
| | | | CACGCUGCCCAGUUC | | | |
| | | | CUGCAGGACAUGCGG | | | |
| | | | CGGUACAUGCCACCG | | | |
| | | | GCCCACCGCAACUUC | | | |
| | | | CUGUGCUCCCUGGAG | | | |
| | | | AGCAACCCCUCCGUG | | | |
| | | | CGGGAGUUCGUGCUG | | | |
| | | | UCCAAGGGCGACGCC | | | |
| | | | GGACUGAGGGAGGCC | | | |
| | | | UACGACGCCUGCGUG | | | |
| | | | AAGGCCCUGGUGUCC | | | |
| | | | CUGCGCAGCUACCAC | | | |
| | | | CUGCAGAUCGUGACC | | | |
| | | | AAGUACAUCCUGAUC | | | |
| | | | CCCGCAAGCCAGCAG | | | |
| | | | CCCAAGGAGAACAAG | | | |
| | | | ACCAGCGAGGACCCC | | | |
| | | | UCCAAGCUGGAAGCU | | | |
| | | | AAGGGCACCGGCGGC | | | |
| | | | ACUGACCUGAUGAAC | | | |
| | | | UUCCUGAAGACCGUG | | | |
| | | | CGGAGCACCACCGAG | | | |
| | | | AAGAGCCUGCUGAAG | | | |
| | | | GAGGGC | | | |
| SEQ ID | | | | | | |
| NO: | | 4 | 5 | 50 | 140 | 313 |
| Human | IDO | MGSSKSKPKDPSQRR | AUGGGGUCGUCGAAG | GGAAAU | UAAGUC | SEQ ID |
| IDO1 | G5 | RGGGSAHAMENSWTI | UCGAAGCCGAAAGAU | CGCAAA | UCCGCU | NO: 313 |
| Variant | m7GpppGm | SKEYHIDEEVGFALP | CCUAGUCAGCGCAGG | AUUUGC | GGAGCC | comprises |
| 2.3 | AG | NPQENLPDFYNDWMF | AGGGGAGGAGGAUCC | UCUUCG | UCGGUG | from |
| | tetra- | IAKHLPDLIESGQLR | GCCCACGCCAUGGAG | CGUUAG | GCCUAG | 5′ to 3′ |
| | nucleotide | ERVEKLNMLSIDHLT | AACAGCUGGACCAUC | AUUUCU | CUUCUU | end: 5′ |
| | cap | DHKSQRLARLVLGCI | AGCAAGGAGUACCAC | UUUAGU | GCCCCU | UTR of |
| | Poly A | TMAYVWGKGHGDVRK | AUCGACGAGGAGGUG | UUUCUC | UGGGCC | SEQ ID |
| | tail: | VLPRNIAVPYCQLSK | GGCUUCGCCCUGCCC | GCAACU | UCCCCC | NO: 50, |
| | 100 nt | KLELPPILVYADCVL | AACCCACAGGAGAAC | AGCAAG | CAGCCC | ORF |
| | (SEQ ID | ANWKKKDPNKPLTYE | CUGCCCGACUUCUAC | CUUUUU | CUCCUC | sequence |
| | NO: 502) | NMDVLFSFRDGDCSK | AACGACUGGAUGUUC | GUUCUC | CCCUUC | of SEQ |
| | | GFFLVSLLVEIAAAS | AUCGCCAAGCACCUG | GCC | CUGCAC | ID NO: |
| | | AIKVIPTVFKAMQMQ | CCCGACCUGAUCGAG | | CCGUAC | 5, and |
| | | ERDTLLKALLEIASC | AGCGGGCAGCUGCGG | | CCCCGU | 3′ UTR |
| | | LEKALQVFHQIHDHV | GAACGGGUGGAGAAG | | GGUCUU | sequence |
| | | NPKAFFSVLRIYLSG | CUGAACAUGCUGAGC | | UGAAUA | of SEQ |
| | | WKGNPQLSDGLVYEG | AUCGACCACCUGACC | | AAGUCU | ID NO: |
| | | FWEDPKEFAGGSAGQ | GACCACAAGUCCCAG | | GAGUGG | 140. |
| | | SSVFQCFDVLLGIQQ | CGGUUGGCUCGGCUG | | GCGGC | |
| | | TAGGGHAAQFLQDMR | GUGCUGGGCUGCAUC | | | |
| | | RYMPPAHRNFLCSLE | ACCAUGGCCUACGUG | | | |
| | | SNPSVREFVLSKGDA | UGGGGAAAGGGGCAC | | | |
| | | GLREAYDACVKALVS | GGUGACGUGCGGAAG | | | |
| | | LRSYHLQIVTKYILI | GUGCUGCCCCGCAAC | | | |
| | | PASQQPKENKTSEDP | AUCGCCGUGCCCUAC | | | |
| | | SKLEAKGTGGTDLMN | UGCCAGCUGAGCAAG | | | |
| | | FLKTVRSTTEKSLLK | AAGCUGGAGCUGCCU | | | |
| | | EG | CCGAUCCUGGUGUAC | | | |
| | | | GCCGACUGCGUGCUG | | | |
| | | | GCCAACUGGAAGAAG | | | |
| | | | AAGGACCCCAACAAG | | | |
| | | | CCCCUGACCUACGAG | | | |
| | | | AACAUGGACGUGCUG | | | |
| | | | UUCUCCUUCCGGGAC | | | |
| | | | GGGGACUGCAGCAAG | | | |
| | | | GGGUUCUUCCUGGUG | | | |
| | | | AGCCUGCUGGUGGAG | | | |
| | | | AUCGCCGCCGCCUCU | | | |
| | | | GCCAUCAAGGUGAUC | | | |
| | | | CCCACCGUGUUCAAG | | | |
| | | | GCCAUGCAGAUGCAG | | | |
| | | | GAGAGGGACACCCUG | | | |
| | | | CUGAAGGCCCUGCUG | | | |
| | | | GAGAUCGCCAGCUGC | | | |
| | | | CUGGAGAAGGCCCUG | | | |
| | | | CAGGUGUUCCACCAG | | | |
| | | | AUCCACGACCACGUG | | | |
| | | | AACCCCAAGGCCUUC | | | |
| | | | UUCAGCGUGCUGCGC | | | |
| | | | AUCUACCUGUCCGGC | | | |
| | | | UGGAAGGGCAAUCCC | | | |
| | | | CAGCUGAGCGACGGC | | | |
| | | | CUGGUGUACGAGGGC | | | |
| | | | UUCUGGGAGGACCCC | | | |
| | | | AAGGAAUUUGCUGGC | | | |
| | | | GGUAGCGCUGGCCAG | | | |
| | | | UCCAGCGUGUUCCAG | | | |
| | | | UGCUUCGACGUGCUG | | | |
| | | | CUGGGCAUUCAGCAA | | | |
| | | | ACCGCUGGAGGCGGA | | | |
| | | | CACGCUGCCCAGUUC | | | |
| | | | CUGCAGGACAUGC | | | |
| | | | GGCGGUACAUGCCAC | | | |
| | | | CGGCCCACCGCAACU | | | |
| | | | UCCUGUGCUCCCUGG | | | |
| | | | AGAGCAACCCCUCCG | | | |
| | | | UGCGGGAGUUCGUGC | | | |
| | | | UGUCCAAGGGCGACG | | | |
| | | | CCGGACUGAGGGAGG | | | |
| | | | CCUACGACGCCUGCG | | | |
| | | | UGAAGGCCCUGGUGU | | | |
| | | | CCCUGCGCAGCUACC | | | |
| | | | ACCUGCAGAUCGUGA | | | |
| | | | CCAAGUACAUCCUGA | | | |
| | | | UCCCCGCAAGCCAGC | | | |
| | | | AGCCCAAGGAGAACA | | | |
| | | | AGACCAGCGAGGACC | | | |
| | | | CCUCCAAGCUGGAAG | | | |
| | | | CUAAGGGCACCGGCG | | | |
| | | | GCACUGACCUGAUGA | | | |
| | | | ACUUCCUGAAGACCG | | | |
| | | | UGCGGAGCACCACCG | | | |
| | | | AGAAGAGCCUGCUGA | | | |
| | | | AGGAGGGC | | | |
| SEQ ID | | | | | | |
| NO: | | 4 | 5 | 50 | 141 | 314 |
| Human | IDO | MGSSKSKPKDPSQRR | AUGGGGUCGUCGAAG | GGAAAU | UAAGCC | SEQ ID |
| IDO1 | G5 | RGGGSAHAMENSWTI | UCGAAGCCGAAAGAU | CGCAAA | CCUCCG | NO: 314 |
| Variant | m7GpppGm | SKEYHIDEEVGFALP | CCUAGUCAGCGCAGG | AUUUGC | GGGGCC | comprises |
| 2.4 | AG | NPQENLPDFYNDWMF | AGGGGAGGAGGAUCC | UCUUCG | UCGGUG | from |
| | tetra- | IAKHLPDLIESGQLR | GCCCACGCCAUGGAG | CGUUAG | GCCUAG | 5′ to 3′ |
| | nucleotide | ERVEKLNMLSIDHLT | AACAGCUGGACCAUC | AUUUCU | CUUCUU | end: 5′ |
| | cap | DHKSQRLARLVLGCI | AGCAAGGAGUACCAC | UUUAGU | GCCCCU | UTR of |
| | Poly A | TMAYVWGKGHGDVRK | AUCGACGAGGAGGUG | UUUCUC | UGGGCC | SEQ ID |
| | tail: | VLPRNIAVPYCQLSK | GGCUUCGCCCUGCCC | GCAACU | UCCCCC | NO: 50, |
| | 100 nt | KLELPPILVYADCVL | AACCCACAGGAGAAC | AGCAAG | CAGCCC | ORF |
| | (SEQ ID | ANWKKKDPNKPLTYE | CUGCCCGACUUCUAC | CUUUUU | CUCCUC | sequence |
| | NO: 502) | NMDVLFSFRDGDCSK | AACGACUGGAUGUUC | GUUCUC | CCCUUC | of SEQ |
| | | GFFLVSLLVEIAAAS | AUCGCCAAGCACCUG | GCC | CUGCAC | ID NO: |
| | | AIKVIPTVFKAMQMQ | CCCGACCUGAUCGAG | | CCGUAC | 5, and |
| | | ERDTLLKALLEIASC | AGCGGGCAGCUGCGG | | CCCCGU | 3′ UTR |
| | | LEKALQVFHQIHDHV | GAACGGGUGGAGAAG | | GGUCUU | sequence |
| | | NPKAFFSVLRIYLSG | CUGAACAUGCUGAGC | | UGAAUA | of SEQ |
| | | WKGNPQLSDGLVYEG | AUCGACCACCUGACC | | AAGUCU | ID NO: |
| | | FWEDPKEFAGGSAGQ | GACCACAAGUCCCAG | | GAGUGG | 141. |
| | | SSVFQCFDVLLGIQQ | CGGUUGGCUCGGCUG | | GCGGC | |
| | | TAGGGHAAQFLQDMR | GUGCUGGGCUGCAUC | | | |
| | | RYMPPAHRNFLCSLE | ACCAUGGCCUACGUG | | | |
| | | SNPSVREFVLSKGDA | UGGGGAAAGGGGCAC | | | |
| | | GLREAYDACVKALVS | GGUGACGUGCGGAAG | | | |
| | | LRSYHLQIVTKYILI | GUGCUGCCCCGCAAC | | | |
| | | PASQQPKENKTSEDP | AUCGCCGUGCCCUAC | | | |
| | | SKLEAKGTGGTDLMN | UGCCAGCUGAGCAAG | | | |
| | | FLKTVRSTTEKSLLK | AAGCUGGAGCUGCCU | | | |
| | | EG | CCGAUCCUGGUGUAC | | | |
| | | | GCCGACUGCGUGCUG | | | |
| | | | GCCAACUGGAAGAAG | | | |
| | | | AAGGACCCCAACAAG | | | |
| | | | CCCCUGACCUACGAG | | | |
| | | | AACAUGGACGUGCUG | | | |
| | | | UUCUCCUUCCGGGAC | | | |
| | | | GGGGACUGCAGCAAG | | | |
| | | | GGGUUCUUCCUGGUG | | | |
| | | | AGCCUGCUGGUGGAG | | | |
| | | | AUCGCCGCCGCCUCU | | | |
| | | | GCCAUCAAGGUGAUC | | | |
| | | | CCCACCGUGUUCAAG | | | |
| | | | GCCAUGCAGAUGCAG | | | |
| | | | GAGAGGGACACCCUG | | | |
| | | | CUGAAGGCCCUGCUG | | | |
| | | | GAGAUCGCCAGCUGC | | | |
| | | | CUGGAGAAGGCCCUG | | | |
| | | | CAGGUGUUCCACCAG | | | |
| | | | AUCCACGACCACGUG | | | |
| | | | AACCCCAAGGCCUUC | | | |
| | | | UUCAGCGUGCUGCGC | | | |
| | | | AUCUACCUGUCCGGC | | | |
| | | | UGGAAGGGCAAUCCC | | | |
| | | | CAGCUGAGCGACGGC | | | |
| | | | CUGGUGUACGAGGGC | | | |
| | | | UUCUGGGAGGACCCC | | | |
| | | | AAGGAAUUUGCUGGC | | | |
| | | | GGUAGCGCUGGCCAG | | | |
| | | | UCCAGCGUGUUCCAG | | | |
| | | | UGCUUCGACGUGCUG | | | |
| | | | CUGGGCAUUCAGCAA | | | |
| | | | ACCGCUGGAGGCGGA | | | |
| | | | CACGCUGCCCAGUUC | | | |
| | | | CUGCAGGACAUGCGG | | | |
| | | | CGGUACAUGCCACCG | | | |
| | | | GCCCACCGCAACUUC | | | |
| | | | CUGUGCUCCCUGGAG | | | |
| | | | AGCAACCCCUCCGUG | | | |
| | | | CGGGAGUUCGUGCUG | | | |
| | | | UCCAAGGGCGACGCC | | | |
| | | | GGACUGAGGGAGGCC | | | |
| | | | UACGACGCCUGCGUG | | | |
| | | | AAGGCCCUGGUGUCC | | | |
| | | | CUGCGCAGCUACCAC | | | |
| | | | CUGCAGAUCGUGACC | | | |
| | | | AAGUACAUCCUGAUC | | | |
| | | | CCCGCAAGCCAGCAG | | | |
| | | | CCCAAGGAGAACAAG | | | |
| | | | ACCAGCGAGGACCCC | | | |
| | | | UCCAAGCUGGAAGCU | | | |
| | | | AAGGGCACCGGCGGC | | | |
| | | | ACUGACCUGAUGAAC | | | |
| | | | UUCCUGAAGACCGUG | | | |
| | | | CGGAGCACCACCGAG | | | |
| | | | AAGAGCCUGCUGAAG | | | |
| | | | GAGGGC | | | |
| SEQ ID | | | | | | |
| NO: | | 4 | 5 | 50 | 140 | 315 |
| Human | IDO | MGSSKSKPKDPSQRR | AUGGGGUCGUCGAAG | GGAAAU | UAAGUC | SEQ ID |
| IDO1 | G5 | RGGGSAHAMENSWTI | UCGAAGCCGAAAGAU | CGCAAA | UCCGCU | NO: 315 |
| Variant | m7GpppGm | SKEYHIDEEVGFALP | CCUAGUCAGCGCAGG | AUUUGC | GGAGCC | comprises |
| 2.5 | AG | NPQENLPDFYNDWMF | AGGGGAGGAGGAUCC | UCUUCG | UCGGUG | from |
| | tetra- | IAKHLPDLIESGQLR | GCCCACGCCAUGGAG | CGUUAG | GCCUAG | 5′ to 3′ |
| | nucleotide | ERVEKLNMLSIDHLT | AACAGCUGGACCAUC | AUUUCU | CUUCUU | end: 5′ |
| | cap | DHKSQRLARLVLGCI | AGCAAGGAGUACCAC | UUUAGU | GCCCCU | UTR of |
| | A100- | TMAYVWGKGHGDVRK | AUCGACGAGGAGGUG | UUUCUC | UGGGCC | SEQ ID |
| | A20- | VLPRNIAVPYCQLSK | GGCUUCGCCCUGCCC | GCAACU | UCCCCC | NO: 50, |
| | idT nt | KLELPPILVYADCVL | AACCCACAGGAGAAC | AGCAAG | CAGCCC | ORF |
| | (SEQ | ANWKKKDPNKPLTYE | CUGCCCGACUUCUAC | CUUUUU | CUCCUC | sequence |
| | ID NO: | NMDVLFSFRDGDCSK | AACGACUGGAUGUUC | GUUCUC | CCCUUC | of SEQ |
| | 709) | GFFLVSLLVEIAAAS | AUCGCCAAGCACCUG | GCC | CUGCAC | ID NO: |
| | Poly A | AIKVIPTVFKAMQMQ | CCCGACCUGAUCGAG | | CCGUAC | 5, and |
| | tail: | ERDTLLKALLEIASC | AGCGGGCAGCUGCGG | | CCCCGU | 3′ UTR |
| | 100 nt | LEKALQVFHQIHDHV | GAACGGGUGGAGAAG | | GGUCUU | sequence |
| | (SEQ ID | NPKAFFSVLRIYLSG | CUGAACAUGCUGAGC | | UGAAUA | of SEQ |
| | NO: 502) | WKGNHKSQRLARLVL | AUCGACCACCUGACC | | AAGUCU | ID NO: |
| | | GCITMAYVWGKGHGD | GACCACAAGUCCCAG | | GAGUGG | 140. |
| | | VRKVLPRNIAVPYCQ | CGGUUGGCUCGGCUG | | GCGGC | |
| | | LSKKLELPPILVYAD | GUGCUGGGCUGCAUC | | | |
| | | CVLANWKKKDPNKPL | ACCAUGGCCUACGUG | | | |
| | | TYENMDVLFSFRDGD | UGGGGAAAGGGGCAC | | | |
| | | CSKGFFLVSLLVEIA | GGUGACGUGCGGAAG | | | |
| | | AASAIKVIPTVFKAM | GUGCUGCCCCGCAAC | | | |
| | | QMQERDTLLKALLEI | AUCGCCGUGCCCUAC | | | |
| | | ASCLEKALQVFHQIH | UGCCAGCUGAGCAAG | | | |
| | | DHVNPKAFFSVLRIY | AAGCUGGAGCUGCCU | | | |
| | | LSGWKGNPQLSDGLV | CCGAUCCUGGUGUAC | | | |
| | | YEGFWEDPKEFAGGS | GCCGACUGCGUGCUG | | | |
| | | AGQSSVFQCFDVLLG | GCCAACUGGAAGAAG | | | |
| | | IQQTAGGGHAAQFLQ | AAGGACCCCAACAAG | | | |
| | | DMRRYMPPAHRNFLC | CCCCUGACCUACGAG | | | |
| | | SLESNPSVREFVLSK | AACAUGGACGUUCAU | | | |
| | | GDAGLREAYDACVKA | CGCCAAGCACCUGCC | | | |
| | | LVSLRSYHLQIVTKY | CGACCUGAUCGAGAG | | | |
| | | ILIPA | CGGGCAGCUGCGGGA | | | |
| | | | ACGGGUGGAGAAGCU | | | |
| | | | GAACAUGCUGAGCAU | | | |
| | | | CGACCACCUGACCGA | | | |
| | | | CCACAAGUCCCAGCG | | | |
| | | | GUUGGCUCGGCUGGU | | | |
| | | | GCUGGGCUGCAUCAC | | | |
| | | | CAUGGCCUACGUGUG | | | |
| | | | GGGAAAGGGGCACGG | | | |
| | | | UGACGUGCGGAAGGU | | | |
| | | | GCUGCCCCGCAACAU | | | |
| | | | CGCCGUGCCCUACUG | | | |
| | | | CCAGCUGAGCAAGAA | | | |
| | | | GCUGGAGCUGCCUCC | | | |
| | | | GAUCCUGGUGUACGC | | | |
| | | | CGACUGCGUGCUGGC | | | |
| | | | CAACUGGAAGAAGAA | | | |
| | | | GGACCCCAACAAGCC | | | |
| | | | CCUGACCUACGAGAA | | | |
| | | | CAUGGACGUGCUGUU | | | |
| | | | CUCCUUCCGGGACGG | | | |
| | | | GGACUGCAGCAAGGG | | | |
| | | | GUUCUUCCUGGUGAG | | | |
| | | | CCUGCUGGUGGAGAU | | | |
| | | | CGCCGCCGCCUCUGC | | | |
| | | | CAUCAAGGUGAUCCC | | | |
| | | | CACCGUGUUCAAGGC | | | |
| | | | CAUGCAGAUGCAGGA | | | |
| | | | GAGGGACACCCUGCU | | | |
| | | | GAAGGCCCUGCUGGA | | | |
| | | | GAUCGCCAGCUGCCU | | | |
| | | | GGAGAAGGCCCUGCA | | | |
| | | | GGUGUUCCACCAGAU | | | |
| | | | CCACGACCACGUGAA | | | |
| | | | CCCCAAGGCUGCGUG | | | |
| | | | AAGGCCCUGGUGUCC | | | |
| | | | CUGCGCAGCUACCAC | | | |
| | | | CUGCAGAUCGUGACC | | | |
| | | | AAGUACAUCCUGAUC | | | |
| | | | CCCGCAAGCCAGCAG | | | |
| | | | CCCAAGGAGAACAAG | | | |
| | | | ACCAGCGAGGACCCC | | | |
| | | | UCCAAGCUGGAAGCU | | | |
| | | | AAGGGCACCGGCGGC | | | |
| | | | ACUGACCUGAUGAAC | | | |
| | | | UUCCUGAAGACCGUG | | | |
| | | | CGGAGCACCACCGAG | | | |
| | | | AAGAGCCUGCUGAAG | | | |
| | | | GAGGGC | | | |
| SEQ ID | | | | | | |
| NO: | | 6 | 7 | 55 | 107 | 316 |
| Human | IDO | MAHAMENSWTISKEY | AUGGCACACGCUAUG | GGAAAU | UGAUAA | SEQ ID |
| IDO1 | G5 | HIDEEVGFALPNPQE | GAGAACUCCUGGACA | AAGAGA | UAGGCU | NO: 316 |
| Variant | Cap C1 | NLPDFYNDWMFIAKH | AUCAGUAAAGAGUAC | GAAAAG | GGAGCC | comprises |
| 3.1 | Poly A | LPDLIESGQLRERVE | CAUAUUGACGAAGAA | AAGAGU | UCGGUG | from |
| | tail: | KLNMLSIDHLTDHKS | GUGGGCUUUGCUUUG | AAGAAG | GCCAUG | 5′ to 3′ |
| | 100 nt | QRLARLVLGCITMAY | CCAAAUCCACAGGAG | AAAUAU | CUUCUU | end: 5′ |
| | (SEQ ID | VWGKGHGDVRKVLPR | AAUCUACCAGAUUUC | AAGAGC | GCCCCU | UTR of |
| | NO: 502) | NIAVPYCQLSKKLEL | UAUAACGACUGGAUG | CACC | UGGGCC | SEQ ID |
| | | PPILVYADCVLANWK | UUCAUUGCUAAACAU | | UCCCCC | NO: 55, |
| | | KKDPNKPLTYENMDV | UUACCAGAUCUCAUA | | CAGCCC | ORF |
| | | LFSFRDGDCSKGFFL | GAGUCUGGCCAGCUU | | CUCCUC | sequence |
| | | VSLLVEIAAASAIKV | CGAGAAAGAGUUGAG | | CCCUUC | of SEQ |
| | | IPTVFKAMQMQERDT | AAGUUAAACAUGCUC | | CUGCAC | ID NO: |
| | | LLKALLEIASCLEKA | AGCAUUGAUCAUCUC | | CCGUAC | 7, and |
| | | LQVFHQIHDHVNPKA | ACAGACCACAAGUCA | | CCCCGU | 3′ UTR |
| | | FFSVLRIYLSGWKGN | CAGCGCCUUGCACGU | | GGUCUU | sequence |
| | | PQLSDGLVYEGFWED | CUAGUUCUGGGAUGC | | UGAAUA | of SEQ |
| | | PKEFAGGSAGQSSVF | AUCACCAUGGCAUAU | | AAGUCU | ID NO: |
| | | QCFDVLLGIQQTAGG | GUGUGGGGCAAAGGU | | GAGUGG | 107. |
| | | GHAAQFLQDMRRYMP | CAUGGAGAUGUCCGU | | GCGGC | |
| | | PAHRNFLCSLESNPS | AAGGUCUUGCCAAGA | | | |
| | | VREFVLSKGDAGLRE | AAUAUUGCUGUUCCU | | | |
| | | AYDACVKALVSLRSY | UACUGCCAACUCUCC | | | |
| | | HLQIVTKYILIPASQ | AAGAAACUGGAACUG | | | |
| | | QPKENKTSEDPSKLE | CCUCCUAUUUUGGUU | | | |
| | | AKGTGGTDLMNFLKT | UAUGCAGACUGUGUC | | | |
| | | VRSTTEKSLLKEG | UUGGCCAAUUGGAAG | | | |
| | | | AAGAAGGAUCCUAAU | | | |
| | | | AAGCCCCUGACUUAU | | | |
| | | | GAGAACAUGGACGUU | | | |
| | | | UUGUUCUCAUUUCGU | | | |
| | | | GAUGGAGACUGCAGU | | | |
| | | | AAAGGAUUCUUCCUC | | | |
| | | | GUCUCUCUAUUGGUG | | | |
| | | | GAAAUAGCAGCUGCU | | | |
| | | | UCUGCAAUCAAAGUA | | | |
| | | | AUUCCUACUGUAUUC | | | |
| | | | AAGGCAAUGCAAAUG | | | |
| | | | CAAGAACGGGACACU | | | |
| | | | UUGCUAAAGGCGCUG | | | |
| | | | CUGGAGAUCGCUUCU | | | |
| | | | UGCUUGGAGAAAGCC | | | |
| | | | CUUCAAGUGUUUCAU | | | |
| | | | CAAAUACAUGAUCAU | | | |
| | | | GUGAACCCUAAGGCA | | | |
| | | | UUCUUCAGUGUUCUU | | | |
| | | | CGCAUAUAUUUGUCU | | | |
| | | | GGCUGGAAAGGCAAU | | | |
| | | | CCGCAGCUAUCAGAC | | | |
| | | | GGUCUGGUGUAUGAA | | | |
| | | | GGCUUCUGGGAAGAC | | | |
| | | | CCAAAGGAGUUUGCA | | | |
| | | | GGAGGCAGUGCAGGC | | | |
| | | | CAAAGCAGCGUCUUU | | | |
| | | | CAGUGCUUUGACGUC | | | |
| | | | CUGCUGGGCAUCCAG | | | |
| | | | CAGACUGCUGGUGGA | | | |
| | | | GGACAUGCUGCUCAG | | | |
| | | | UUCCUCCAGGACAUG | | | |
| | | | AGAAGAUAUAUGCCA | | | |
| | | | CCAGCUCACAGGAAC | | | |
| | | | UUCCUGUGCUCAUUA | | | |
| | | | GAGUCAAAUCCCUCA | | | |
| | | | GUCCGUGAGUUUGUC | | | |
| | | | CUUUCUAAGGGUGAU | | | |
| | | | GCUGGCCUGCGGGAA | | | |
| | | | GCUUAUGACGCCUGU | | | |
| | | | GUGAAAGCUCUGGUG | | | |
| | | | UCCCUGAGGAGCUAC | | | |
| | | | CAUCUGCAAAUCGUG | | | |
| | | | ACUAAGUACAUCCUG | | | |
| | | | AUUCCUGCAAGCCAG | | | |
| | | | CAGCCUAAGGAGAAU | | | |
| | | | AAGACCUCUGAAGAC | | | |
| | | | CCUUCAAAGUUGGAG | | | |
| | | | GCAAAGGGCACUGGA | | | |
| | | | GGCACUGAUUUAAUG | | | |
| | | | AAUUUCCUGAAGACU | | | |
| | | | GUAAGAAGUACAACU | | | |
| | | | GAGAAAUCCCUUUUG | | | |
| | | | AAGGAAGGU | | | |
| SEQ ID | | | | | | |
| NO: | | 16 | 17 | 56 | 108 | 317 |
| Human | IDO | MAHAMENSWTISKEY | AUGGCCCACGCCAUG | GGAAAU | UGAUAA | SEQ ID |
| IDO1 | G5 | HIDEEVGFALPNPQE | GAGAACAGCUGGACC | AAGAGA | UAGGCU | NO: 317 |
| Variant | Cap C1 | NLPDFYNDWMFIAKH | AUCAGCAAGGAGUAC | GAAAAG | GGAGCC | comprises |
| 4.1 | Poly A | LPDLIESGQLRERVE | CACAUCGACGAGGAG | AAGAGU | UCGGUG | from |
| | tail: | KLNMLSIDHLTDHKS | GUGGGCUUCGCCCUG | AAGAAG | GCCUAG | 5′ to 3′ |
| | 100 nt | QRLARLVLGCITMAY | CCUAACCCUCAGGAG | AAAUAU | CUUCUU | end: 5′ |
| | (SEQ ID | VWGKGHGDVRKVLPR | AACCUGCCUGACUUC | AAGACC | GCCCCU | UTR of |
| | NO: 502) | NIAVPYCQLSKKLEL | UACAACGACUGGAUG | CCGGCG | UGGGCC | SEQ ID |
| | | PPILVYADCVLANWK | UUCAUCGCCAAGCAU | CCGCCA | UCCCCC | NO: 56, |
| | | KKDPNKPLTYENMDV | CUGCCGGACCUGAUC | CC | CAGCCC | ORF |
| | | LFSFRDGDCSKGFFL | GAGAGCGGCCAGCUG | | CUCCUC | sequence |
| | | VSLLVEIAAASAIKV | AGAGAGAGAGUGGAG | | CCCUUC | of SEQ |
| | | IPTVFKAMQMQERDT | AAGCUGAACAUGCUG | | CUGCAC | ID NO: |
| | | LLKALLEIASCLEKA | AGCAUCGACCACCUG | | CCGUAC | 17, and |
| | | LQVFHQIHDHVNPKA | ACCGACCACAAGAGC | | CCCCGU | 3′ UTR |
| | | FFSVLRIYLSGWKGN | CAGAGACUGGCCAGA | | GGUCUU | sequence |
| | | PQLSDGLVYEGFWED | CUGGUGCUGGGCUGC | | UGAAUA | of SEQ |
| | | PKEFAGGSAGQSSVF | AUCACCAUGGCCUAC | | AAGUCU | ID NO: |
| | | QCFDVLLGIQQTAGG | GUGUGGGGCAAGGGC | | GAGUGG | 108. |
| | | GHAAQFLQDMRRYMP | CACGGCGACGUGAGA | | GCGGC | |
| | | PAHRNFLCSLESNPS | AAGGUGCUGCCUAGA | | | |
| | | VREFVLSKGDAGLRE | AACAUCGCCGUGCCU | | | |
| | | AYDACVKALVSLRSY | UACUGCCAGCUGAGC | | | |
| | | HLQIVTKYILIPASQ | AAGAAGCUGGAGCUG | | | |
| | | QPKENKTSEDPSKLE | CCUCCUAUCCUGGUG | | | |
| | | AKGTGGTDLMNFLKT | UACGCCGACUGCGUG | | | |
| | | VRSTTEKSLLKEGGG | CUGGCCAACUGGAAG | | | |
| | | GGSGGGGSYRLKKIS | AAGAAGGACCCUAAC | | | |
| | | KEEKTPGCVKIKKC | AAGCCUCUGACCUAC | | | |
| | | | GAGAACAUGGACGUG | | | |
| | | | CUGUUCAGCUUCAGA | | | |
| | | | GACGGCGACUGCAGC | | | |
| | | | AAGGGCUUCUUCCUG | | | |
| | | | GUGAGCCUGCUGGUG | | | |
| | | | GAGAUCGCCGCCGCC | | | |
| | | | AGCGCCAUCAAGGUG | | | |
| | | | AUCCCUACCGUGUUC | | | |
| | | | AAGGCCAUGCAGAUG | | | |
| | | | CAGGAGAGAGACACC | | | |
| | | | CUGCUGAAGGCCCUG | | | |
| | | | UUGGAAAUCGCCAGC | | | |
| | | | UGCCUGGAGAAGGCG | | | |
| | | | CUGCAGGUGUUCCAC | | | |
| | | | CAGAUCCACGACCAC | | | |
| | | | GUGAACCCUAAGGCC | | | |
| | | | UUCUUCAGCGUGCUG | | | |
| | | | AGAAUCUACCUGAGC | | | |
| | | | GGCUGGAAGGGCAAC | | | |
| | | | CCUCAGCUGAGCGAC | | | |
| | | | GGACUGGUAUACGAG | | | |
| | | | GGCUUCUGGGAGGAC | | | |
| | | | CCUAAGGAGUUCGCU | | | |
| | | | GGAGGCUCCGCGGGA | | | |
| | | | CAGAGCAGCGUGUUC | | | |
| | | | CAGUGCUUCGACGUG | | | |
| | | | CUGCUGGGCAUCCAG | | | |
| | | | CAGACCGCUGGUGGC | | | |
| | | | GGACACGCAGCUCAG | | | |
| | | | UUCCUGCAGGACAUG | | | |
| | | | AGAAGAUACAUGCCU | | | |
| | | | CCUGCCCACAGAAAC | | | |
| | | | UUCCUGUGCAGCCUG | | | |
| | | | GAGAGCAACCCUAGC | | | |
| | | | GUGAGAGAGUUCGUG | | | |
| | | | CUGAGCAAGGGCGAC | | | |
| | | | GCCGGCCUGAGAGAG | | | |
| | | | GCCUACGACGCCUGC | | | |
| | | | GUUAAGGCUUUGGUG | | | |
| | | | UCACUGAGAAGCUAC | | | |
| | | | CACCUGCAGAUCGUG | | | |
| | | | ACCAAGUACAUCCUG | | | |
| | | | AUCCCUGCCAGCCAG | | | |
| | | | CAGCCUAAGGAGAAC | | | |
| | | | AAGACCAGCGAGGAC | | | |
| | | | CCUAGCAAGCUGGAG | | | |
| | | | GCCAAGGGCACCGGC | | | |
| | | | GGCACCGACCUGAUG | | | |
| | | | AACUUCCUGAAGACC | | | |
| | | | GUGAGAAGCACCACC | | | |
| | | | GAGAAGAGUCUGCUG | | | |
| | | | AAGGAGGGCGGUGGA | | | |
| | | | GGCGGAUCUGGUGGA | | | |
| | | | GGAGGCAGCUACAGA | | | |
| | | | CUGAAGAAGAUCUCC | | | |
| | | | AAGGAGGAGAAGACC | | | |
| | | | CCUGGCUGCGUGAAG | | | |
| | | | AUCAAGAAGUGC | | | |
| SEQ ID | | | | | | |
| NO: | | 18 | 19 | 56 | 108 | 318 |
| Human | IDO | MGSSKSKPKDPSQRR | AUGGGCAGCAGCAAG | GGAAAU | UGAUAA | SEQ ID |
| IDO1 | G5 | RGGGSAHAMENSWTI | AGCAAGCCUAAGGAC | AAGAGA | UAGGCU | NO: |
| Variant | Cap C1 | SKEYHIDEEVGFALP | CCUAGCCAGAGAAGA | GAAAAG | GGAGCC | 318 |
| 5.1 | Poly A | NPQENLPDFYNDWMF | AGAGGCGGAGGCUCC | AAGAGU | UCGGUG | comprises |
| | tail: | IAKHLPDLIESGQLR | GCCCACGCCAUGGAG | AAGAAG | GCCUAG | from 5′ |
| | 100 nt | ERVEKLNMLSIDHLT | AACAGCUGGACCAUC | AAAUAU | CUUCUU | to 3′ |
| | (SEQ ID | DHKSQRLARLVLGCI | AGCAAGGAGUACCAC | AAGACC | GCCCCU | end: 5′ |
| | NO: 502) | TMAYVWGKGHGDVRK | AUCGACGAGGAGGUG | CCGGCG | UGGGCC | UTR of |
| | | VLPRNIAVPYCQLSK | GGCUUCGCCCUGCCU | CCGCCA | UCCCCC | SEQ ID |
| | | KLELPPILVYADCVL | AACCCUCAGGAGAAC | CC | CAGCCC | NO: 56, |
| | | ANWKKKDPNKPLTYE | CUGCCUGACUUCUAC | | CUCCUC | ORF |
| | | NMDVLFSFRDGDCSK | AACGACUGGAUGUUC | | CCCUUC | sequence |
| | | GFFLVSLLVEIAAAS | AUCGCCAAGCACUUG | | CUGCAC | of SEQ |
| | | AIKVIPTVFKAMQMQ | CCGGACCUGAUCGAG | | CCGUAC | ID NO: |
| | | ERDTLLKALLEIASC | AGCGGCCAGCUGAGA | | CCCCGU | 19, and |
| | | LEKALQVFHQIHDHV | GAGAGAGUGGAGAAG | | GGUCUU | 3′ UTR |
| | | NPKAFFSVLRIYLSG | CUGAACAUGCUGAGC | | UGAAUA | sequence |
| | | WKGNPQLSDGLVYEG | AUCGACCACCUGACC | | AAGUCU | of SEQ |
| | | FWEDPKEFAGGSAGQ | GACCACAAGAGCCAG | | GAGUGG | ID NO: |
| | | SSVFQCFDVLLGIQQ | AGACUGGCCAGACUG | | GCGGC | 108. |
| | | TAGGGHAAQFLQDMR | GUGCUGGGCUGCAUC | | | |
| | | RYMPPAHRNFLCSLE | ACCAUGGCCUACGUG | | | |
| | | SNPSVREFVLSKGDA | UGGGGCAAGGGCCAC | | | |
| | | GLREAYDACVKALVS | GGCGACGUGAGAAAG | | | |
| | | LRSYHLQIVTKYILI | GUGCUGCCUAGAAAC | | | |
| | | PASQQPKENKTSEDP | AUCGCCGUGCCUUAC | | | |
| | | SKLEAKGTGGTDLMN | UGCCAGCUGAGCAAG | | | |
| | | FLKTVRSTTEKSLLK | AAGCUGGAGCUGCCU | | | |
| | | EG | CCUAUCCUGGUGUAC | | | |
| | | | GCCGACUGCGUGCUG | | | |
| | | | GCCAACUGGAAGAAG | | | |
| | | | AAGGACCCUAACAAG | | | |
| | | | CCUCUGACCUACGAG | | | |
| | | | AACAUGGACGUGCUG | | | |
| | | | UUCAGCUUCAGAGAC | | | |
| | | | GGCGACUGCAGCAAG | | | |
| | | | GGCUUCUUCCUGGUG | | | |
| | | | AGCCUGCUGGUGGAG | | | |
| | | | AUCGCCGCCGCCAGC | | | |
| | | | GCCAUCAAGGUGAUC | | | |
| | | | CCUACCGUGUUCAAG | | | |
| | | | GCCAUGCAGAUGCAG | | | |
| | | | GAGAGAGACACCCUG | | | |
| | | | CUGAAGGCCCUGUUG | | | |
| | | | GAGAUAGCCAGCUGC | | | |
| | | | CUGGAGAAGGCACUG | | | |
| | | | CAGGUGUUCCACCAG | | | |
| | | | AUCCACGACCACGUG | | | |
| | | | AACCCUAAGGCCUUC | | | |
| | | | UUCAGCGUGCUGAGA | | | |
| | | | AUCUACCUGAGCGGC | | | |
| | | | UGGAAGGGCAACCCU | | | |
| | | | CAGCUGAGCGACGGC | | | |
| | | | CUGGUCUACGAGGGC | | | |
| | | | UUCUGGGAGGACCCU | | | |
| | | | AAGGAGUUCGCUGGC | | | |
| | | | GGCUCUGCCGGCCAG | | | |
| | | | AGCAGCGUGUUCCAG | | | |
| | | | UGCUUCGACGUGCUG | | | |
| | | | CUGGGCAUCCAACAA | | | |
| | | | ACCGCAGGAGGCGGC | | | |
| | | | CACGCUGCACAGUUC | | | |
| | | | CUGCAGGACAUGAGA | | | |
| | | | AGAUACAUGCCUCCU | | | |
| | | | GCCCACAGAAACUUC | | | |
| | | | CUGUGCAGCCUGGAG | | | |
| | | | AGCAACCCUAGCGUG | | | |
| | | | AGAGAGUUCGUGCUG | | | |
| | | | AGCAAGGGCGACGCC | | | |
| | | | GGCCUGAGAGAGGCC | | | |
| | | | UACGACGCCUGCGUU | | | |
| | | | AAGGCCCUUGUGUCU | | | |
| | | | CUGAGAAGCUACCAC | | | |
| | | | CUGCAGAUCGUGACC | | | |
| | | | AAGUACAUCCUGAUC | | | |
| | | | CCUGCCAGCCAGCAG | | | |
| | | | CCUAAGGAGAACAAG | | | |
| | | | ACCAGCGAGGACCCA | | | |
| | | | AGCAAGCUGGAGGCC | | | |
| | | | AAGGGCACCGGCGGC | | | |
| | | | ACCGACCUGAUGAAC | | | |
| | | | UUCCUGAAGACCGUG | | | |
| | | | AGAAGCACCACCGAG | | | |
| | | | AAGUCCCUCCUGAAG | | | |
| | | | GAGGGC | | | |

Human TDO2 Constructs

| SEQ ID | | | | | | |
|---|---|---|---|---|---|---|
| NO: | | 10 | 11 | 55 | 107 | 319 |
| Human | TDO2 | MSGCPFLGNNFGYTF | AUGAGUGGGUGCCCA | GGAAAU | UGAUAA | SEQ ID |
| TDO2 | G5 | KKLPVEGSEEDKSQT | UUCUUAGGAAACAAC | AAGAGA | UAGGCU | NO: 319 |
| Variant | Cap C1 | GVNRASKGGLIYGNY | UUUGGAUAUACUUUU | GAAAAG | GGAGCC | comprises |
| 1.1 | Poly A | LHLEKVLNAQELQSE | AAGAAACUCCCCGUA | AAGAGU | UCGGUG | from |
| | tail: | TKGNKIHDEHLFIIT | GAAGGCAGCGAAGAA | AAGAAG | GCCAUG | 5′ to 3′ |
| | 100 nt | HQAYELWFKQILWEL | GACAAAUCACAAACC | AAAUAU | CUUCUU | end: 5′ |
| | (SEQ ID | DSVREIFQNGHVRDE | GGUGUGAAUAGAGCC | AAGAGC | GCCCCU | UTR of |
| | NO: 502) | RNMLKVVSRMHRVSV | AGCAAAGGAGGUCUU | CACC | UGGGCC | SEQ ID |
| | | ILKLLVQQFSILETM | AUCUACGGGAACUAC | | UCCCCC | NO: 55, |
| | | TALDFNDFREYLSPA | CUCCAUUUGGAGAAA | | CAGCCC | ORF |
| | | SGFQSLQFRLLENKI | GUUUUGAAUGCACAA | | CUCCUC | sequence |
| | | GVLQNMRVPYNRRHY | GAACUGCAAAGUGAA | | CCCUUC | of SEQ |
| | | RDNFKGEENELLLKS | ACCAAGGGAAAUAAG | | CUGCAC | ID NO: |
| | | EQEKTLLELVEAWLE | AUCCAUGAUGAACAU | | CCGUAC | 11, and |
| | | RTPGLEPHGFNFWGK | CUCUUCAUCAUAACU | | CCCCGU | 3′ UTR |
| | | LEKNITRGLEEEFIR | CAUCAAGCUUAUGAA | | GGUCUU | sequence |
| | | IQAKEESEEKEEQVA | CUCUGGUUUAAGCAA | | UGAAUA | of SEQ |
| | | EFQKQKEVLLSLFDE | AUCCUCUGGGAGUUG | | AAGUCU | ID NO: |
| | | KRHEHLLSKGERRLS | GAUUCUGUUCGAGAG | | GAGUGG | 107. |
| | | YRALQGALMIYFYRE | AUCUUUCAGAAUGGC | | GCGGC | |
| | | EPRFQVPFQLLTSLM | CAUGUCAGAGAUGAA | | | |
| | | DIDSLMTKWRYNHVC | AGGAACAUGCUUAAG | | | |
| | | MVHRMLGSKAGTGGS | GUUGUUUCUCGGAUG | | | |
| | | SGYHYLRSTVSDRYK | CACCGAGUGUCAGUG | | | |
| | | VFVDLFNLSTYLIPR | AUCCUGAAACUGCUG | | | |
| | | HWIPKMNPTIHKFLY | GUGCAGCAGUUUUCC | | | |
| | | TAEYCDSSYFSSDES | AUUCUGGAGACGAUG | | | |
| | | D | ACAGCCUUGGACUUC | | | |
| | | | AAUGACUUCAGAGAG | | | |
| | | | UACUUAUCUCCAGCA | | | |
| | | | UCAGGCUUCCAGAGU | | | |
| | | | UUGCAAUUCCGACUA | | | |
| | | | UUAGAGAACAAGAUA | | | |
| | | | GGUGUUCUUCAGAAC | | | |
| | | | AUGAGAGUCCCUUAU | | | |
| | | | AACAGAAGACAUUAU | | | |
| | | | CGUGAUAACUUCAAA | | | |
| | | | GGAGAAGAGAAUGAA | | | |
| | | | CUGCUACUUAAAUCU | | | |
| | | | GAGCAGGAGAAGACA | | | |
| | | | CUUCUGGAAUUAGUG | | | |
| | | | GAGGCAUGGCUGGAA | | | |
| | | | AGAACUCCAGGUUUA | | | |
| | | | GAGCCACAUGGAUUU | | | |
| | | | AACUUCUGGGGAAAG | | | |
| | | | CUUGAGAAGAAUAUC | | | |
| | | | ACCAGAGGCCUGGAA | | | |
| | | | GAGGAAUUCAUAAGG | | | |
| | | | AUUCAGGCUAAAGAA | | | |
| | | | GAGUCUGAAGAGAAA | | | |
| | | | GAGGAACAGGUGGCU | | | |
| | | | GAAUUUCAGAAGCAG | | | |
| | | | AAGGAGGUGCUACUG | | | |
| | | | UCCUUAUUUGAUGAG | | | |
| | | | AAACGUCACGAACAC | | | |
| | | | CUCCUUAGUAAAGGU | | | |
| | | | GAAAGACGGCUGUCA | | | |
| | | | UACAGAGCACUUCAG | | | |
| | | | GGAGCAUUGAUGAUA | | | |
| | | | UACUUCUACAGGGAG | | | |
| | | | GAGCCUAGGUUCCAG | | | |
| | | | GUGCCUUUUCAGUUG | | | |
| | | | CUGACUUCUCUUAUG | | | |
| | | | GACAUAGAUUCACUG | | | |
| | | | AUGACCAAAUGGAGA | | | |
| | | | UAUAACCAUGUGUGC | | | |
| | | | AUGGUGCACAGAAUG | | | |
| | | | CUGGGCAGCAAAGCU | | | |
| | | | GGCACCGGUGGUUCC | | | |
| | | | UCAGGCUAUCACUAU | | | |
| | | | UUACGAUCAACUGUG | | | |
| | | | AGUGAUAGGUACAAG | | | |
| | | | GUCUUCGUCGAUCUU | | | |
| | | | UUCAAUCUUUCAACA | | | |
| | | | UACCUGAUUCCCCGA | | | |
| | | | CACUGGAUACCGAAG | | | |
| | | | AUGAACCCAACCAUU | | | |
| | | | CACAAAUUUCUAUAU | | | |
| | | | ACAGCAGAAUACUGU | | | |
| | | | GAUAGCUCCUACUUC | | | |
| | | | AGCAGUGAUGAAUCA | | | |
| | | | GAU | | | |
| SEQ ID | | | | | | |
| NO: | | 12 | 13 | 55 | 107 | 320 |
| Human | TDO2 | MGSSKSKPKDPSQRR | AUGGGCAGCAGCAAG | GGAAAU | UGAUAA | SEQ ID |
| TDO2 | G5 | RGGGSSGCPFLGNNF | AGCAAGCCUAAGGAC | AAGAGA | UAGGCU | NO: 320 |
| Variant | Cap C1 | GYTFKKLPVEGSEED | CCUAGCCAGAGAAGA | GAAAAG | GGAGCC | comprises |
| 2.1 | Poly A | KSQTGVNRASKGGLI | AGAGGCGGCGGCUCA | AAGAGU | UCGGUG | from |
| | tail: | YGNYLHLEKVLNAQE | UCCGGCUGCCCUUUC | AAGAAG | GCCAUG | 5′ to 3′ |
| | 100 nt | LQSETKGNKIHDEHL | CUGGGCAACAACUUC | AAAUAU | CUUCUU | end: 5′ |
| | (SEQ ID | FIITHQAYELWFKQI | GGCUACACCUUCAAG | AAGAGC | GCCCCU | UTR of |
| | NO: 502) | LWELDSVREIFQNGH | AAGCUGCCUGUGGAG | CACC | UGGGCC | SEQ ID |
| | | VRDERNMLKVVSRMH | GGCAGCGAGGAGGAC | | UCCCCC | NO: 55, |
| | | RVSVILKLLVQQFSI | AAGAGCCAGACCGGC | | CAGCCC | ORF |
| | | LETMTALDFNDFREY | GUGAACAGAGCCAGC | | CUCCUC | sequence |
| | | LSPASGFQSLQFRLL | AAGGGCGGCCUGAUC | | CCCUUC | of SEQ |
| | | ENKIGVLQNMRVPYN | UACGGCAACUACCUG | | CUGCAC | ID NO: |
| | | RRHYRDNFKGEENEL | CACCUGGAGAAGGUG | | CCGUAC | 13, and |
| | | LLKSEQEKTLLELVE | CUGAACGCCCAGGAG | | CCCCGU | 3′ UTR |
| | | AWLERTPGLEPHGFN | CUGCAGAGCGAAACU | | GGUCUU | sequence |
| | | FWGKLEKNITRGLEE | AAGGGUAACAAGAUC | | UGAAUA | of SEQ |
| | | EFIRIQAKEESEEKE | CACGACGAGCACCUG | | AAGUCU | ID NO: |
| | | EQVAEFQKQKEVLLS | UUCAUCAUCACCCAC | | GAGUGG | 107. |
| | | LFDEKRHEHLLSKGE | CAGGCCUACGAGCUG | | GCGGC | |
| | | RRLSYRALQGALMIY | UGGUUCAAGCAGAUC | | | |
| | | FYREEPRFQVPFQLL | CUGUGGGAGCUGGAC | | | |
| | | TSLMDIDSLMTKWRY | AGCGUGAGAGAGAUC | | | |
| | | NHVCMVHRMLGSKAG | UUCCAGAACGGCCAC | | | |
| | | TGGSSGYHYLRSTVS | GUCAGGGACGAGAGA | | | |
| | | DRYKVFVDLFNLSTY | AACAUGCUGAAGGUG | | | |
| | | LIPRHWIPKMNPTIH | GUGAGCAGAAUGCAC | | | |
| | | KFLYTAEYCDSSYFS | AGAGUGAGCGUGAUC | | | |
| | | SDESDGGKPIPNPLL | CUGAAGCUGCUGGUG | | | |
| | | GLDST | CAGCAGUUCAGCAUC | | | |
| | | | CUGGAAACAAUGACC | | | |
| | | | GCCCUGGACUUCAAC | | | |
| | | | GACUUCAGAGAGUAC | | | |
| | | | CUGAGCCCUGCCAGC | | | |
| | | | GGCUUCCAGAGCCUU | | | |
| | | | CAGUUCAGACUGCUG | | | |
| | | | GAGAAUAAGAUCGGC | | | |
| | | | GUGCUGCAGAACAUG | | | |
| | | | AGAGUGCCUUACAAC | | | |
| | | | AGAAGACACUACAGA | | | |
| | | | GACAACUUCAAGGGC | | | |
| | | | GAGGAGAACGAGCUG | | | |
| | | | CUGCUCAAGAGCGAG | | | |
| | | | CAGGAGAAGACCCUC | | | |
| | | | UUGGAACUGGUGGAG | | | |
| | | | GCCUGGCUGGAGAGA | | | |
| | | | ACCCCUGGCCUGGAG | | | |
| | | | CCUCACGGCUUCAAC | | | |
| | | | UUCUGGGGCAAGCUU | | | |
| | | | GAGAAGAACAUCACC | | | |
| | | | AGAGGACUCGAAGAG | | | |
| | | | GAGUUCAUCAGAAUC | | | |
| | | | CAGGCCAAGGAGGAG | | | |
| | | | UCAGAGGAGAAGGAG | | | |
| | | | GAACAGGUGGCCGAG | | | |
| | | | UUCCAGAAGCAGAAG | | | |
| | | | GAAGUGCUGCUAAGC | | | |
| | | | CUGUUCGACGAGAAG | | | |
| | | | AGACACGAACACCUG | | | |
| | | | CUGUCGAAGGGAGAA | | | |
| | | | AGAAGACUGAGCUAC | | | |
| | | | CGUGCUUUGCAGGGC | | | |
| | | | GCCCUGAUGAUCUAC | | | |
| | | | UUCUACAGGGAGGAG | | | |
| | | | CCUAGAUUCCAGGUG | | | |
| | | | CCUUUCCAGCUGCUG | | | |
| | | | ACCAGCCUGAUGGAC | | | |
| | | | AUCGACUCUUUGAUG | | | |
| | | | ACCAAGUGGAGAUAC | | | |
| | | | AACCACGUGUGCAUG | | | |
| | | | GUGCACAGAAUGCUC | | | |
| | | | GGCUCCAAGGCCGGC | | | |
| | | | ACCGGUGGUAGCUCC | | | |
| | | | GGAUACCACUACCUG | | | |
| | | | AGAAGCACCGUGAGC | | | |
| | | | GACAGAUACAAGGUG | | | |
| | | | UUCGUGGACCUCUUC | | | |
| | | | AACCUCAGCACCUAC | | | |
| | | | CUGAUCCCUAGACAC | | | |
| | | | UGGAUCCCUAAGAUG | | | |
| | | | AACCCUACCAUCCAC | | | |
| | | | AAGUUCCUGUACACC | | | |
| | | | GCCGAGUACUGCGAC | | | |
| | | | AGCAGCUACUUCAGC | | | |
| | | | AGCGACGAGAGCGAC | | | |
| | | | GGCGGCAAGCCUAUC | | | |
| | | | CCUAACCCUCUGCUG | | | |
| | | | GGCCUGGACAGCACC | | | |
| SEQ ID | | | | | | |
| NO: | | 12 | 13 | 50 | 108 | 321 |
| Human | TDO2 | MGSSKSKPKDPSQRR | AUGGGCAGCAGCAAG | GGAAAU | UGAUAA | SEQ ID |
| IDO1 | G5 | RGGGSSGCPFLGNNF | AGCAAGCCUAAGGAC | CGCAAA | UAGGCU | NO: 321 |
| Variant | Cap C1 | GYTFKKLPVEGSEED | CCUAGCCAGAGAAGA | AUUUGC | GGAGCC | comprises |
| 2.2 | Poly A | KSQTGVNRASKGGLI | AGAGGCGGCGGCUCA | UCUUCG | UCGGUG | from |
| | tail: | YGNYLHLEKVLNAQE | UCCGGCUGCCCUUUC | CGUUAG | GCCUAG | 5′ to 3′ |
| | 100 nt | LQSETKGNKIHDEHL | CUGGGCAACAACUUC | AUUUCU | CUUCUU | end: 5′ |
| | (SEQ ID | FIITHQAYELWFKQI | GGCUACACCUUCAAG | UUUAGU | GCCCCU | UTR of |
| | NO: 502) | LWELDSVREIFQNGH | AAGCUGCCUGUGGAG | UUUCUC | UGGGCC | SEQ ID |
| | | VRDERNMLKVVSRMH | GGCAGCGAGGAGGAC | GCAACU | UCCCCC | NO: 50, |
| | | RVSVILKLLVQQFSI | AAGAGCCAGACCGGC | AGCAAG | CAGCCC | ORF |
| | | LETMTALDFNDFREY | GUGAACAGAGCCAGC | CUUUUU | CUCCUC | sequence |
| | | LSPASGFQSLQFRLL | AAGGGCGGCCUGAUC | GUUCUC | CCCUUC | of SEQ |
| | | ENKIGVLQNMRVPYN | UACGGCAACUACCUG | GCC | CUGCAC | ID NO: |
| | | RRHYRDNFKGEENEL | CACCUGGAGAAGGUG | | CCGUAC | 13, and |
| | | LLKSEQEKTLLELVE | CUGAACGCCCAGGAG | | CCCCGU | 3′ UTR |
| | | AWLERTPGLEPHGFN | CUGCAGAGCGAAACU | | GGUCUU | sequence |
| | | FWGKLEKNITRGLEE | AAGGGUAACAAGAUC | | UGAAUA | of SEQ |
| | | EFIRIQAKEESEEKE | CACGACGAGCACCUG | | AAGUCU | ID NO: |
| | | EQVAEFQKQKEVLLS | UUCAUCAUCACCCAC | | GAGUGG | 108. |
| | | LFDEKRHEHLLSKGE | CAGGCCUACGAGCUG | | GCGGC | |
| | | RRLSYRALQGALMIY | UGGUUCAAGCAGAUC | | | |
| | | FYREEPRFQVPFQLL | CUGUGGGAGCUGGAC | | | |
| | | TSLMDIDSLMTKWRY | AGCGUGAGAGAGAUC | | | |
| | | NHVCMVHRMLGSKAG | UUCCAGAACGGCCAC | | | |
| | | TGGSSGYHYLRSTVS | GUCAGGGACGAGAGA | | | |
| | | DRYKVFVDLFNLSTY | AACAUGCUGAAGGUG | | | |
| | | LIPRHWIPKMNPTIH | GUGAGCAGAAUGCAC | | | |
| | | KFLYTAEYCDSSYFS | AGAGUGAGCGUGAUC | | | |
| | | SDESDGGKPIPNPLL | CUGAAGCUGCUGGUG | | | |
| | | GLDST | CAGCAGUUCAGCAUC | | | |
| | | | CUGGAAACAAUGACC | | | |
| | | | GCCCUGGACUUCAAC | | | |
| | | | GACUUCAGAGAGUAC | | | |
| | | | CUGAGCCCUGCCAGC | | | |
| | | | GGCUUCCAGAGCCUU | | | |
| | | | CAGUUCAGACUGCUG | | | |
| | | | GAGAAUAAGAUCGGC | | | |
| | | | GUGCUGCAGAACAUG | | | |
| | | | AGAGUGCCUUACAAC | | | |
| | | | AGAAGACACUACAGA | | | |
| | | | GACAACUUCAAGGGC | | | |
| | | | GAGGAGAACGAGCUG | | | |
| | | | CUGCUCAAGAGCGAG | | | |
| | | | CAGGAGAAGACCCUC | | | |
| | | | UUGGAACUGGUGGAG | | | |
| | | | GCCUGGCUGGAGAGA | | | |
| | | | ACCCCUGGCCUGGAG | | | |
| | | | CCUCACGGCUUCAAC | | | |
| | | | UUCUGGGGCAAGCUU | | | |
| | | | GAGAAGAACAUCACC | | | |
| | | | AGA | | | |
| | | | GGACUCGAAGAGGAG | | | |
| | | | UUCAUCAGAAUCCAG | | | |
| | | | GCCAAGGAGGAGUCA | | | |
| | | | GAGGAGAAGGAGGAA | | | |
| | | | CAGGUGGCCGAGUUC | | | |
| | | | CAGAAGCAGAAGGAA | | | |
| | | | GUGCUGCUAAGCCUG | | | |
| | | | UUCGACGAGAAGAGA | | | |
| | | | CACGAACACCUGCUG | | | |
| | | | UCGAAGGGAGAAAGA | | | |
| | | | AGACUGAGCUACCGU | | | |
| | | | GCUUUGCAGGGCGCC | | | |
| | | | CUGAUGAUCUACUUC | | | |
| | | | UACAGGGAGGAGCCU | | | |
| | | | AGAUUCCAGGUGCCU | | | |
| | | | UUCCAGCUGCUGACC | | | |
| | | | AGCCUGAUGGACAUC | | | |
| | | | GACUCUUUGAUGACC | | | |
| | | | AAGUGGAGAUACAAC | | | |
| | | | CACGUGUGCAUGGUG | | | |
| | | | CACAGAAUGCUCGGC | | | |
| | | | UCCAAGGCCGGCACC | | | |
| | | | GGUGGUAGCUCCGGA | | | |
| | | | UACCACUACCUGAGA | | | |
| | | | AGCACCGUGAGCGAC | | | |
| | | | AGAUACAAGGUGUUC | | | |
| | | | GUGGACCUCUUCAAC | | | |
| | | | CUCAGCACCUACCUG | | | |
| | | | AUCCCUAGACACUGG | | | |
| | | | AUCCCUAAGAUGAAC | | | |
| | | | CCUACCAUCCACAAG | | | |
| | | | UUCCUGUACACCGCC | | | |
| | | | GAGUACUGCGACAGC | | | |
| | | | AGCUACUUCAGCAGC | | | |
| | | | GACGAGAGCGACGGC | | | |
| | | | GGCAAGCCUAUCCCU | | | |
| | | | AACCCUCUGCUGGGC | | | |
| | | | CUGGACAGCACC | | | |
| SEQ ID | | | | | | |
| NO: | | 12 | 13 | 50 | 140 | 322 |
| Human | TDO2 | MGSSKSKPKDPSQRR | AUGGGCAGCAGCAAG | GGAAAU | UAAGUC | SEQ ID |
| TDO2 | G5 | RGGGSSGCPFLGNNF | AGCAAGCCUAAGGAC | CGCAAA | UCCGCU | NO: 322 |
| Variant | Cap C1 | GYTFKKLPVEGSEED | CCUAGCCAGAGAAGA | AUUUGC | GGAGCC | comprises |
| 2.3 | Poly A | KSQTGVNRASKGGLI | AGAGGCGGCGGCUCA | UCUUCG | UCGGUG | from |
| | tail: | YGNYLHLEKVLNAQE | UCCGGCUGCCCUUUC | CGUUAG | GCCUAG | 5′ to 3′ |
| | 100 nt | LQSETKGNKIHDEHL | CUGGGCAACAACUUC | AUUUCU | CUUCUU | end: 5′ |
| | (SEQ ID | FIITHQAYELWFKQI | GGCUACACCUUCAAG | UUUAGU | GCCCCU | UTR of |
| | NO: 502) | LWELDSVREIFQNGH | AAGCUGCCUGUGGAG | UUUCUC | UGGGCC | SEQ ID |
| | | VRDERNMLKVVSRMH | GGCAGCGAGGAGGAC | GCAACU | UCCCCC | NO: 50, |
| | | RVSVILKLLVQQFSI | AAGAGCCAGACCGGC | AGCAAG | CAGCCC | ORF |
| | | LETMTALDFNDFREY | GUGAACAGAGCCAGC | CUUUUU | CUCCUC | sequence |
| | | LSPASGFQSLQFRLL | AAGGGCGGCCUGAUC | GUUCUC | CCCUUC | of SEQ |
| | | ENKIGVLQNMRVPYN | UACGGCAACUACCUG | GCC | CUGCAC | ID NO: |
| | | RRHYRDNFKGEENEL | CACCUGGAGAAGGUG | | CCGUAC | 13, and |
| | | LLKSEQEKTLLELVE | CUGAACGCCCAGGAG | | CCCCGU | 3′ UTR |
| | | AWLERTPGLEPHGFN | CUGCAGAGCGAAACU | | GGUCUU | sequence |
| | | FWGKLEKNITRGLEE | AAGGGUAACAAGAUC | | UGAAUA | of SEQ |
| | | EFIRIQAKEESEEKE | CACGACGAGCACCUG | | AAGUCU | ID NO: |
| | | EQVAEFQKQKEVLLS | UUCAUCAUCACCCAC | | GAGUGG | 140. |
| | | LFDEKRHEHLLSKGE | CAGGCCUACGAGCUG | | GCGGC | |
| | | RRLSYRALQGALMIY | UGGUUCAAGCAGAUC | | | |
| | | FYREEPRFQVPFQLL | CUGUGGGAGCUGGAC | | | |
| | | TSLMDIDSLMTKWRY | AGCGUGAGAGAGAUC | | | |
| | | NHVCMVHRMLGSKAG | UUCCAGAACGGCCAC | | | |
| | | TGGSSGYHYLRSTVS | GUCAGGGACGAGAGA | | | |
| | | DRYKVFVDLFNLSTY | AACAUGCUGAAGGUG | | | |
| | | LIPRHWIPKMNPTIH | GUGAGCAGAAUGCAC | | | |
| | | KFLYTAEYCDSSYFS | AGAGUGAGCGUGAUC | | | |
| | | SDESDGGKPIPNPLL | CUGAAGCUGCUGGUG | | | |
| | | GLDST | CAGCAGUUCAGCAUC | | | |
| | | | CUGGAAACAAUGACC | | | |
| | | | GCCCUGGACUUCAAC | | | |
| | | | GACUUCAGAGAGUAC | | | |
| | | | CUGAGCCCUGCCAGC | | | |
| | | | GGCUUCCAGAGCCUU | | | |
| | | | CAGUUCAGACUGCUG | | | |
| | | | GAGAAUAAGAUCGGC | | | |
| | | | GUGCUGCAGAACAUG | | | |
| | | | AGAGUGCCUUACAAC | | | |
| | | | AGAAGACACUACAGA | | | |
| | | | GACAACUUCAAGGGC | | | |
| | | | GAGGAGAACGAGCUG | | | |
| | | | CUGCUCAAGAGCGAG | | | |
| | | | CAGGAGAAGACCCUC | | | |
| | | | UUGGAACUGGUGGAG | | | |
| | | | GCCUGGCUGGAGAGA | | | |
| | | | ACCCCUGGCCUGGAG | | | |
| | | | CCUCACGGCUUCAAC | | | |
| | | | UUCUGGGGCAAGCUU | | | |
| | | | GAGAAGAACAUCACC | | | |
| | | | AGAGGACUCGAAGAG | | | |
| | | | GAGUUCAUCAGAAUC | | | |
| | | | CAGGCCAAGGAGGAG | | | |
| | | | UCAGAGGAGAAGGAG | | | |
| | | | GAACAGGUGGCCGAG | | | |
| | | | UUCCAGAAGCAGAAG | | | |
| | | | GAAGUGCUGCUAAGC | | | |
| | | | CUGUUCGACGAGAAG | | | |
| | | | AGACACGAACACCUG | | | |
| | | | CUGUCGAAGGGAGAA | | | |
| | | | AGAAGACUGAGCUAC | | | |
| | | | CGUGCUUUGCAGGGC | | | |
| | | | GCCCUGAUGAUCUAC | | | |
| | | | UUCUACAGGGAGGAG | | | |
| | | | CCUAGAUUCCAGGUG | | | |
| | | | CCUUUCCAGCUGCUG | | | |
| | | | ACCAGCCUGAUGGAC | | | |
| | | | AUCGACUCUUUGAUG | | | |
| | | | ACCAAGUGGAGAUAC | | | |
| | | | AACCACGUGUGCAUG | | | |
| | | | GUGCACAGAAUGCUC | | | |
| | | | GGCUCCAAGGCCGGC | | | |
| | | | ACCGGUGGUAGCUCC | | | |
| | | | GGAUACCACUACCUG | | | |
| | | | AGAAGCACCGUGAGC | | | |
| | | | GACAGAUACAAGGUG | | | |
| | | | UUCGUGGACCUCUUC | | | |
| | | | AACCUCAGCACCUAC | | | |
| | | | CUGAUCCCUAGACAC | | | |
| | | | UGGAUCCCUAAGAUG | | | |
| | | | AACCCUACCAUCCAC | | | |
| | | | AAGUUCCUGUACACC | | | |
| | | | GCCGAGUACUGCGAC | | | |
| | | | AGCAGCUACUUCAGC | | | |
| | | | AGCGACGAGAGCGAC | | | |
| | | | GGCGGCAAGCCUAUC | | | |
| | | | CCUAACCCUCUGCUG | | | |
| | | | GGCCUGGACAGCACC | | | |
| SEQ ID | | | | | | |
| NO: | | 12 | 14 | 50 | 108 | 323 |
| Human | TDO2 | MGSSKSKPKDPSQRR | AUGGGCAGCAGCAAG | GGAAAU | UGAUAA | SEQ ID |
| TDO2 | G5 | RGGGSSGCPFLGNNF | UCCAAGCCCAAGGAC | CGCAAA | UAGGCU | NO: 323 |
| Variant | Cap C1 | GYTFKKLPVEGSEED | CCUUCCCAGAGAAGG | AUUUGC | GGAGCC | comprises |
| 2.4 | Poly A | KSQTGVNRASKGGLI | AGGGGUGGCGGCUCU | UCUUCG | UCGGUG | from |
| | tail: | YGNYLHLEKVLNAQE | AGCGGCUGCCCCUUC | CGUUAG | GCCUAG | 5′ to 3′ |
| | 100 nt | LQSETKGNKIHDEHL | CUGGGCAACAACUUC | AUUUCU | CUUCUU | end: 5′ |
| | (SEQ ID | FIITHQAYELWFKQI | GGCUACACCUUCAAG | UUUAGU | GCCCCU | UTR of |
| | NO: 502) | LWELDSVREIFQNGH | AAGCUGCCCGUGGAG | UUUCUC | UGGGCC | SEQ ID |
| | | VRDERNMLKVVSRMH | GGCAGCGAGGAGGAC | GCAACU | UCCCCC | NO: 50, |
| | | RVSVILKLLVQQFSI | AAGUCCCAGACCGGC | AGCAAG | CAGCCC | ORF |
| | | LETMTALDFNDFREY | GUGAACCGGGCCAGC | CUUUUU | CUCCUC | sequence |
| | | LSPASGFQSLQFRLL | AAGGGUGGCCUGAUC | GUUCUC | CCCUUC | of SEQ |
| | | ENKIGVLQNMRVPYN | UACGGCAACUACCUG | GCC | CUGCAC | ID NO: |
| | | RRHYRDNFKGEENEL | CACCUGGAGAAGGUG | | CCGUAC | 14, and |
| | | LLKSEQEKTLLELVE | CUGAACGCCCAGGAG | | CCCCGU | 3′ UTR |
| | | AWLERTPGLEPHGFN | CUGCAGUCCGAGACC | | GGUCUU | sequence |
| | | FWGKLEKNITRGLEE | AAGGGCAAUAAGAUC | | UGAAUA | of SEQ |
| | | EFIRIQAKEESEEKE | CACGACGAGCACCUG | | AAGUCU | ID NO: |
| | | EQVAEFQKQKEVLLS | UUCAUCAUCACCCAC | | GAGUGG | 108. |
| | | LFDEKRHEHLLSKGE | CAGGCCUACGAGCUG | | GCGGC | |
| | | RRLSYRALQGALMIY | UGGUUCAAGCAGAUC | | | |
| | | FYREEPRFQVPFQLL | CUGUGGGAGCUGGAU | | | |
| | | TSLMDIDSLMTKWRY | AGCGUGAGGGAGAUC | | | |
| | | NHVCMVHRMLGSKAG | UUCCAGAACGGCCAC | | | |
| | | TGGSSGYHYLRSTVS | GUGCGGGACGAGCGC | | | |
| | | DRYKVFVDLFNLSTY | AACAUGCUGAAGGUG | | | |
| | | LIPRHWIPKMNPTIH | GUGAGCCGGAUGCAC | | | |
| | | KFLYTAEYCDSSYFS | CGGGUGUCCGUGAUC | | | |
| | | SDESDGGKPIPNPLL | CUGAAGCUGCUGGUG | | | |
| | | GLDST | CAGCAGUUCAGUAUC | | | |
| | | | CUGGAGACCAUGACC | | | |
| | | | GCCCUGGACUUCAAC | | | |
| | | | GACUUCCGGGAGUAC | | | |
| | | | CUGAGCCCAGCCUCC | | | |
| | | | GGGUUCCAGUCCCUG | | | |
| | | | CAGUUCAGACUGCUG | | | |
| | | | GAGAACAAGAUCGGG | | | |
| | | | GUGCUGCAGAACAUG | | | |
| | | | CGGGUGCCUUACAAC | | | |
| | | | CGGCGGCACUACCGG | | | |
| | | | GACAACUUCAAGGGC | | | |
| | | | GAGGAGAACGAGCUG | | | |
| | | | CUGCUGAAGUCCGAG | | | |
| | | | CAGGAGAAGACCCUG | | | |
| | | | CUGGAGCUGGUGGAG | | | |
| | | | GCCUGGCUGGAGCGG | | | |
| | | | ACACCCGGGCUGGAG | | | |
| | | | CCACACGGGUUCAAC | | | |
| | | | UUCUGGGGCAAGCUG | | | |
| | | | GAGAAGAACAUCACC | | | |
| | | | AGAGGCCUGGAGGAG | | | |
| | | | GAGUUCAUCCGCAUC | | | |
| | | | CAGGCCAAGGAAGAG | | | |
| | | | UCCGAGGAGAAGGAG | | | |
| | | | GAGCAGGUGGCCGAG | | | |
| | | | UUCCAGAAGCAGAAG | | | |
| | | | GAGGUGCUGCUGAGC | | | |
| | | | CUGUUCGACGAGAAG | | | |
| | | | AGGCACGAGCACCUG | | | |
| | | | CUGUCCAAGGGCGAG | | | |
| | | | AGGCGGCUGAGCUAC | | | |
| | | | AGAGCCCUACAGGGC | | | |
| | | | GCCCUGAUGAUCUAC | | | |
| | | | UUCUACAGGGAGGAG | | | |
| | | | CCCCGCUUCCAGGUG | | | |
| | | | CCCUUCCAGCUGCUG | | | |
| | | | ACCAGCCUGAUGGAC | | | |
| | | | AUCGACAGCCUGAUG | | | |
| | | | ACCAAGUGGCGGUAC | | | |
| | | | AACCACGUGUGCAUG | | | |
| | | | GUGCACCGGAUGCUG | | | |
| | | | GGCUCCAAAGCCGGA | | | |
| | | | ACGGGCGGCAGUUCC | | | |
| | | | GGCUACCACUACCUG | | | |
| | | | CGGAGCACCGUGUCC | | | |
| | | | GACCGGUACAAGGUG | | | |
| | | | UUCGUGGACCUGUUC | | | |
| | | | AACCUGAGCACCUAC | | | |
| | | | CUGAUCCCUCGGCAC | | | |
| | | | UGGAUCCCUAAGAUG | | | |
| | | | AACCCCACCAUCCAC | | | |
| | | | AAGUUCCUGUACACC | | | |
| | | | GCCGAGUACUGCGAC | | | |
| | | | AGCAGCUACUUCUCC | | | |
| | | | UCCGACGAGUCCGAC | | | |
| | | | GGCGGAAAGCCCAUC | | | |
| | | | CCCAAUCCCCUGCUG | | | |
| | | | GGCCUGGACUCCACC | | | |
| SEQ ID | | | | | | |
| NO: | | 12 | 14 | 50 | 140 | 324 |
| Human | TDO2 | MGSSKSKPKDPSQRR | AUGGGCAGCAGCAAG | GGAAAU | UAAGUC | SEQ ID |
| TDO2 | G5 | RGGGSSGCPFLGNNF | UCCAAGCCCAAGGAC | CGCAAA | UCCGCU | NO: 324 |
| Variant | Cap C1 | GYTFKKLPVEGSEED | CCUUCCCAGAGAAGG | AUUUGC | GGAGCC | comprises |
| 2.5 | Poly A | KSQTGVNRASKGGLI | AGGGGUGGCGGCUCU | UCUUCG | UCGGUG | from |
| | tail: | YGNYLHLEKVLNAQE | AGCGGCUGCCCCUUC | CGUUAG | GCCUAG | 5′ to 3′ |
| | 100 nt | LQSETKGNKIHDEHL | CUGGGCAACAACUUC | AUUUCU | CUUCUU | end: 5′ |
| | (SEQ ID | FIITHQAYELWFKQI | GGCUACACCUUCAAG | UUUAGU | GCCCCU | UTR of |
| | NO: 502) | LWELDSVREIFQNGH | AAGCUGCCCGUGGAG | UUUCUC | UGGGCC | SEQ ID |
| | | VRDERNMLKVVSRMH | GGCAGCGAGGAGGAC | GCAACU | UCCCCC | NO: 50, |
| | | RVSVILKLLVQQFSI | AAGUCCCAGACCGGC | AGCAAG | CAGCCC | ORF |
| | | LETMTALDFNDFREY | GUGAACCGGGCCAGC | CUUUUU | CUCCUC | sequence |
| | | LSPASGFQSLQFRLL | AAGGGUGGCCUGAUC | GUUCUC | CCCUUC | of SEQ |
| | | ENKIGVLQNMRVPYN | UACGGCAACUACCUG | GCC | CUGCAC | ID NO: |
| | | RRHYRDNFKGEENEL | CACCUGGAGAAGGUG | | CCGUAC | 14, and |
| | | LLKSEQEKTLLELVE | CUGAACGCCCAGGAG | | CCCCGU | 3′ UTR |
| | | AWLERTPGLEPHGFN | CUGCAGUCCGAGACC | | GGUCUU | sequence |
| | | FWGKLEKNITRGLEE | AAGGGCAAUAAGAUC | | UGAAUA | of SEQ |
| | | EFIRIQAKEESEEKE | CACGACGAGCACCUG | | AAGUCU | ID NO: |
| | | EQVAEFQKQKEVLLS | UUCAUCAUCACCCAC | | GAGUGG | 140. |
| | | LFDEKRHEHLLSKGE | CAGGCCUACGAGCUG | | GCGGC | |
| | | RRLSYRALQGALMIY | UGGUUCAAGCAGAUC | | | |
| | | FYREEPRFQVPFQLL | CUGUGGGAGCUGGAU | | | |
| | | TSLMDIDSLMTKWRY | AGCGUGAGGGAGAUC | | | |
| | | NHVCMVHRMLGSKAG | UUCCAGAACGGCCAC | | | |
| | | TGGSSGYHYLRSTVS | GUGCGGGACGAGCGC | | | |
| | | DRYKVFVDLFNLSTY | AACAUGCUGAAGGUG | | | |
| | | LIPRHWIPKMNPTIH | GUGAGCCGGAUGCAC | | | |
| | | KFLYTAEYCDSSYFS | CGGGUGUCCGUGAUC | | | |
| | | SDESDGGKPIPNPLL | CUGAAGCUGCUGGUG | | | |
| | | GLDST | CAGCAGUUCAGUAUC | | | |
| | | | CUGGAGACCAUGACC | | | |
| | | | GCCCUGGACUUCAAC | | | |
| | | | GACUUCCGGGAGUAC | | | |
| | | | CUGAGCCCAGCCUCC | | | |
| | | | GGGUUCCAGUCCCUG | | | |
| | | | CAGUUCAGACUGCUG | | | |
| | | | GAGAACAAGAUCGGG | | | |
| | | | GUGCUGCAGAACAUG | | | |
| | | | CGGGUGCCUUACAAC | | | |
| | | | CGGCGGCACUACCGG | | | |
| | | | GACAACUUCAAGGGC | | | |
| | | | GAGGAGAACGAGCUG | | | |
| | | | CUGCUGAAGUCCGAG | | | |
| | | | CAGGAGAAGACCCUG | | | |
| | | | CUGGAGCUGGUGGAG | | | |
| | | | GCCUGGCUGGAGCGG | | | |
| | | | ACACCCGGGCUGGAG | | | |
| | | | CCACACGGGUUCAAC | | | |
| | | | UUCUGGGGCAAGCUG | | | |
| | | | GAGAAGAACAUCACC | | | |
| | | | AGAGGCCUGGAGGAG | | | |
| | | | GAGUUCAUCCGCAUC | | | |
| | | | CAGGCCAAGGAAGAG | | | |
| | | | UCCGAGGAGAAGGAG | | | |
| | | | GAGCAGGUGGCCGAG | | | |
| | | | UUCCAGAAGCAGAAG | | | |
| | | | GAGGUGCUGCUGAGC | | | |
| | | | CUGUUCGACGAGAAG | | | |
| | | | AGGCACGAGCACCUG | | | |
| | | | CUGUCCAAGGGCGAG | | | |
| | | | AGGCGGCUGAGCUAC | | | |
| | | | AGAGCCCUACAGGGC | | | |
| | | | GCCCUGAUGAUCUAC | | | |
| | | | UUCUACAGGGAGGAG | | | |
| | | | CCCCGCUUCCAGGUG | | | |
| | | | CCCUUCCAGCUGCUG | | | |
| | | | ACCAGCCUGAUGGAC | | | |
| | | | AUCGACAGCCUGAUG | | | |
| | | | ACCAAGUGGCGGUAC | | | |
| | | | AACCACGUGUGCAUG | | | |
| | | | GUGCACCGGAUGCUG | | | |
| | | | GGCUCCAAAGCCGGA | | | |
| | | | ACGGGCGGCAGUUCC | | | |
| | | | GGCUACCACUACCUG | | | |
| | | | CGGAGCACCGUGUCC | | | |
| | | | GACCGGUACAAGGUG | | | |
| | | | UUCGUGGACCUGUUC | | | |
| | | | AACCUGAGCACCUAC | | | |
| | | | CUGAUCCCUCGGCAC | | | |
| | | | UGGAUCCCUAAGAUG | | | |
| | | | AACCCCACCAUCCAC | | | |
| | | | AAGUUCCUGUACACC | | | |
| | | | GCCGAGUACUGCGAC | | | |
| | | | AGCAGCUACUUCUCC | | | |
| | | | UCCGACGAGUCCGAC | | | |
| | | | GGCGGAAAGCCCAUC | | | |
| | | | CCCAAUCCCCUGCUG | | | |
| | | | GGCCUGGACUCCACC | | | |
| SEQ ID | | | | | | |
| NO: | | 12 | 14 | 50 | 141 | 325 |
| Human | TDO2 | MGSSKSKPKDPSQRR | AUGGGCAGCAGCAAG | GGAAAU | UAAGCC | SEQ ID |
| TDO2 | G5 | RGGGSSGCPFLGNNF | UCCAAGCCCAAGGAC | CGCAAA | CCUCCG | NO: 325 |
| Variant | Cap C1 | GYTFKKLPVEGSEED | CCUUCCCAGAGAAGG | AUUUGC | GGGGCC | comprises |
| 2.6 | Poly A | KSQTGVNRASKGGLI | AGGGGUGGCGGCUCU | UCUUCG | UCGGUG | from |
| | tail: | YGNYLHLEKVLNAQE | AGCGGCUGCCCCUUC | CGUUAG | GCCUAG | 5′ to 3′ |
| | 100 nt | LQSETKGNKIHDEHL | CUGGGCAACAACUUC | AUUUCU | CUUCUU | end: 5′ |
| | (SEQ ID | FIITHQAYELWFKQI | GGCUACACCUUCAAG | UUUAGU | GCCCCU | UTR of |
| | NO: 502) | LWELDSVREIFQNGH | AAGCUGCCCGUGGAG | UUUCUC | UGGGCC | SEQ ID |
| | | VRDERNMLKVVSRMH | GGCAGCGAGGAGGAC | GCAACU | UCCCCC | NO: 50, |
| | | RVSVILKLLVQQFSI | AAGUCCCAGACCGGC | AGCAAG | CAGCCC | ORF |
| | | LETMTALDFNDFREY | GUGAACCGGGCCAGC | CUUUUU | CUCCUC | sequence |
| | | LSPASGFQSLQFRLL | AAGGGUGGCCUGAUC | GUUCUC | CCCUUC | of SEQ |
| | | ENKIGVLQNMRVPYN | UACGGCAACUACCUG | GCC | CUGCAC | ID NO: |
| | | RRHYRDNFKGEENEL | CACCUGGAGAAGGUG | | CCGUAC | 14, and |
| | | LLKSEQEKTLLELVE | CUGAACGCCCAGGAG | | CCCCGU | 3′ UTR |
| | | AWLERTPGLEPHGFN | CUGCAGUCCGAGACC | | GGUCUU | sequence |
| | | FWGKLEKNITRGLEE | AAGGGCAAUAAGAUC | | UGAAUA | of SEQ |
| | | EFIRIQAKEESEEKE | CACGACGAGCACCUG | | AAGUCU | ID NO: |
| | | EQVAEFQKQKEVLLS | UUCAUCAUCACCCAC | | GAGUGG | 141. |
| | | LFDEKRHEHLLSKGE | CAGGCCUACGAGCUG | | GCGGC | |
| | | RRLSYRALQGALMIY | UGGUUCAAGCAGAUC | | | |
| | | FYREEPRFQVPFQLL | CUGUGGGAGCUGGAU | | | |
| | | TSLMDIDSLMTKWRY | AGCGUGAGGGAGAUC | | | |
| | | NHVCMVHRMLGSKAG | UUCCAGAACGGCCAC | | | |
| | | TGGSSGYHYLRSTVS | GUGCGGGACGAGCGC | | | |
| | | DRYKVFVDLFNLSTY | AACAUGCUGAAGGUG | | | |
| | | LIPRHWIPKMNPTIH | GUGAGCCGGAUGCAC | | | |
| | | KFLYTAEYCDSSYFS | CGGGUGUCCGUGAUC | | | |
| | | SDESDGGKPIPNPLL | CUGAAGCUGCUGGUG | | | |
| | | GLDST | CAGCAGUUCAGUAUC | | | |
| | | | CUGGAGACCAUGACC | | | |
| | | | GCCCUGGACUUCAAC | | | |
| | | | GACUUCCGGGAGUAC | | | |
| | | | CUGAGCCCAGCCUCC | | | |
| | | | GGGUUCCAGUCCCUG | | | |
| | | | CAGUUCAGACUGCUG | | | |
| | | | GAGAACAAGAUCGGG | | | |
| | | | GUGCUGCAGAACAUG | | | |
| | | | CGGGUGCCUUACAAC | | | |
| | | | CGGCGGCACUACCGG | | | |
| | | | GACAACUUCAAGGGC | | | |
| | | | GAGGAGAACGAGCUG | | | |
| | | | CUGCUGAAGUCCGAG | | | |
| | | | CAGGAGAAGACCCUG | | | |
| | | | CUGGAGCUGGUGGAG | | | |
| | | | GCCUGGCUGGAGCGG | | | |
| | | | ACACCCGGGCUGGAG | | | |
| | | | CCACACGGGUUCAAC | | | |
| | | | UUCUGGGGCAAGCUG | | | |
| | | | GAGAAGAACAUCACC | | | |
| | | | AGAGGCCUGGAGGAG | | | |
| | | | GAGUUCAUCCGCAUC | | | |
| | | | CAGGCCAAGGAAGAG | | | |
| | | | UCCGAGGAGAAGGAG | | | |
| | | | GAGCAGGUGGCCGAG | | | |
| | | | UUCCAGAAGCAGAAG | | | |
| | | | GAGGUGCUGCUGAGC | | | |
| | | | CUGUUCGACGAGAAG | | | |
| | | | AGGCACGAGCACCUG | | | |
| | | | CUGUCCAAGGGCGAG | | | |
| | | | AGGCGGCUGAGCUAC | | | |
| | | | AGAGCCCUACAGGGC | | | |
| | | | GCCCUGAUGAUCUAC | | | |
| | | | UUCUACAGGGAGGAG | | | |
| | | | CCCCGCUUCCAGGUG | | | |
| | | | CCCUUCCAGCUGCUG | | | |
| | | | ACCAGCCUGAUGGAC | | | |
| | | | AUCGACAGCCUGAUG | | | |
| | | | ACCAAGUGGCGGUAC | | | |
| | | | AACCACGUGUGCAUG | | | |
| | | | GUGCACCGGAUGCUG | | | |
| | | | GGCUCCAAAGCCGGA | | | |
| | | | ACGGGCGGCAGUUCC | | | |
| | | | GGCUACCACUACCUG | | | |
| | | | CGGAGCACCGUGUCC | | | |
| | | | GACCGGUACAAGGUG | | | |
| | | | UUCGUGGACCUGUUC | | | |
| | | | AACCUGAGCACCUAC | | | |
| | | | CUGAUCCCUCGGCAC | | | |
| | | | UGGAUCCCUAAGAUG | | | |
| | | | AACCCCACCAUCCAC | | | |
| | | | AAGUUCCUGUACACC | | | |
| | | | GCCGAGUACUGCGAC | | | |
| | | | AGCAGCUACUUCUCC | | | |
| | | | UCCGACGAGUCCGAC | | | |
| | | | GGCGGAAAGCCCAUC | | | |
| | | | CCCAAUCCCCUGCUG | | | |
| | | | GGCCUGGACUCCACC | | | |
| SEQ ID | | | | | | |
| NO: | | 12 | 14 | 50 | 100 | 326 |
| Human | TDO2 | MGSSKSKPKDPSQRR | AUGGGCAGCAGCAAG | GGAAAU | UAAUAG | SEQ ID |
| TDO2 | G5 | RGGGSSGCPFLGNNF | UCCAAGCCCAAGGAC | CGCAAA | UAAGCU | NO: 326 |
| Variant | Cap C1 | GYTFKKLPVEGSEED | CCUUCCCAGAGAAGG | AUUUGC | GGAGCC | comprises |
| 2.7 | Poly A | KSQTGVNRASKGGLI | AGGGGUGGCGGCUCU | UCUUCG | UCCUGA | from |
| | tail: | YGNYLHLEKVLNAQE | AGCGGCUGCCCCUUC | CGUUAG | GAGACC | 5′ to 3′ |
| | 100 nt | LQSETKGNKIHDEHL | CUGGGCAACAACUUC | AUUUCU | UGUGUG | end: 5′ |
| | (SEQ ID | FIITHQAYELWFKQI | GGCUACACCUUCAAG | UUUAGU | AACUAU | UTR of |
| | NO: 502) | LWELDSVREIFQNGH | AAGCUGCCCGUGGAG | UUUCUC | UGAGAA | SEQ ID |
| | | VRDERNMLKVVSRMH | GGCAGCGAGGAGGAC | GCAACU | GAUCGG | NO: 50, |
| | | RVSVILKLLVQQFSI | AAGUCCCAGACCGGC | AGCAAG | AACAGC | ORF |
| | | LETMTALDFNDFREY | GUGAACCGGGCCAGC | CUUUUU | UCCUUA | sequence |
| | | LSPASGFQSLQFRLL | AAGGGUGGCCUGAUC | GUUCUC | CUCUGA | of SEQ |
| | | ENKIGVLQNMRVPYN | UACGGCAACUACCUG | GCC | GGAAGU | ID NO: |
| | | RRHYRDNFKGEENEL | CACCUGGAGAAGGUG | | UGGUAC | 14, and |
| | | LLKSEQEKTLLELVE | CUGAACGCCCAGGAG | | CCCCGU | 3′ UTR |
| | | AWLERTPGLEPHGFN | CUGCAGUCCGAGACC | | GGUCUU | sequence |
| | | FWGKLEKNITRGLEE | AAGGGCAAUAAGAUC | | UGAAUA | of SEQ |
| | | EFIRIQAKEESEEKE | CACGACGAGCACCUG | | AAGUCU | ID NO: |
| | | EQVAEFQKQKEVLLS | UUCAUCAUCACCCAC | | GAGUGG | 100. |
| | | LFDEKRHEHLLSKGE | CAGGCCUACGAGCUG | | GCGGC | |
| | | RRLSYRALQGALMIY | UGGUUCAAGCAGAUC | | | |
| | | FYREEPRFQVPFQLL | CUGUGGGAGCUGGAU | | | |
| | | TSLMDIDSLMTKWRY | AGCGUGAGGGAGAUC | | | |
| | | NHVCMVHRMLGSKAG | UUCCAGAACGGCCAC | | | |
| | | TGGSSGYHYLRSTVS | GUGCGGGACGAGCGC | | | |
| | | DRYKVFVDLFNLSTY | AACAUGCUGAAGGUG | | | |
| | | LIPRHWIPKMNPTIH | GUGAGCCGGAUGCAC | | | |
| | | KFLYTAEYCDSSYFS | CGGGUGUCCGUGAUC | | | |
| | | SDESDGGKPIPNPLL | CUGAAGCUGCUGGUG | | | |
| | | GLDST | CAGCAGUUCAGUAUC | | | |
| | | | CUGGAGACCAUGACC | | | |
| | | | GCCCUGGACUUCAAC | | | |
| | | | GACUUCCGGGAGUAC | | | |
| | | | CUGAGCCCAGCCUCC | | | |
| | | | GGGUUCCAGUCCCUG | | | |
| | | | CAGUUCAGACUGCUG | | | |
| | | | GAGAACAAGAUCGGG | | | |
| | | | GUGCUGCAGAACAUG | | | |
| | | | CGGGUGCCUUACAAC | | | |
| | | | CGGCGGCACUACCGG | | | |
| | | | GACAACUUCAAGGGC | | | |
| | | | GAGGAGAACGAGCUG | | | |
| | | | CUGCUGAAGUCCGAG | | | |
| | | | CAGGAGAAGACCCUG | | | |
| | | | CUGGAGCUGGUGGAG | | | |
| | | | GCCUGGCUGGAGCGG | | | |
| | | | ACACCCGGGCUGGAG | | | |
| | | | CCACACGGGUUCAAC | | | |
| | | | UUCUGGGGCAAGCUG | | | |
| | | | GAGAAGAACAUCACC | | | |
| | | | AGAGGCCUGGAGGAG | | | |
| | | | GAGUUCAUCCGCAUC | | | |
| | | | CAGGCCAAGGAAGAG | | | |
| | | | UCCGAGGAGAAGGAG | | | |
| | | | GAGCAGGUGGCCGAG | | | |
| | | | UUCCAGAAGCAGAAG | | | |
| | | | GAGGUGCUGCUGAGC | | | |
| | | | CUGUUCGACGAGAAG | | | |
| | | | AGGCACGAGCACCUG | | | |
| | | | CUGUCCAAGGGCGAG | | | |
| | | | AGGCGGCUGAGCUAC | | | |
| | | | AGAGCCCUACAGGGC | | | |
| | | | GCCCUGAUGAUCUAC | | | |
| | | | UUCUACAGGGAGGAG | | | |
| | | | CCCCGCUUCCAGGUG | | | |
| | | | CCCUUCCAGCUGCUG | | | |
| | | | ACCAGCCUGAUGGAC | | | |
| | | | AUCGACAGCCUGAUG | | | |
| | | | ACCAAGUGGCGGUAC | | | |
| | | | AACCACGUGUGCAUG | | | |
| | | | GUGCACCGGAUGCUG | | | |
| | | | GGCUCCAAAGCCGGA | | | |
| | | | ACGGGCGGCAGUUCC | | | |
| | | | GGCUACCACUACCUG | | | |
| | | | CGGAGCACCGUGUCC | | | |
| | | | GACCGGUACAAGGUG | | | |
| | | | UUCGUGGACCUGUUC | | | |
| | | | AACCUGAGCACCUAC | | | |
| | | | CUGAUCCCUCGGCAC | | | |
| | | | UGGAUCCCUAAGAUG | | | |
| | | | AACCCCACCAUCCAC | | | |
| | | | AAGUUCCUGUACACC | | | |
| | | | GCCGAGUACUGCGAC | | | |
| | | | AGCAGCUACUUCUCC | | | |
| | | | UCCGACGAGUCCGAC | | | |
| | | | GGCGGAAAGCCCAUC | | | |
| | | | CCCAAUCCCCUGCUG | | | |
| | | | GGCCUGGACUCCACC | | | |
| SEQ ID | | | | | | |
| NO: | | 12 | 15 | 50 | 108 | 327 |
| Human | TDO2 | MGSSKSKPKDPSQRR | AUGGGAUCUUCUAAA | GGAAAU | UGAUAA | SEQ ID |
| TDO2 | G5 | RGGGSSGCPFLGNNF | UCUAAACCUAAAGAU | CGCAAA | UAGGCU | NO: 327 |
| Variant | Cap C1 | GYTFKKLPVEGSEED | CCUUCUCAAAGAAGA | AUUUGC | GGAGCC | comprises |
| 2.8 | Poly A | KSQTGVNRASKGGLI | AGAGGAGGAGGAUCU | UCUUCG | UCGGUG | from |
| | tail: | YGNYLHLEKVLNAQE | UCUGGAUGUCCUUUU | CGUUAG | GCCUAG | 5′ to 3′ |
| | 100 nt | LQSETKGNKIHDEHL | CUUGGAAAUAAUUUU | AUUUCU | CUUCUU | end: 5′ |
| | (SEQ ID | FIITHQAYELWFKQI | GGAUAUACAUUUAAG | UUUAGU | GCCCCU | UTR of |
| | NO: 502) | LWELDSVREIFQNGH | AAACUUCCUGUUGAA | UUUCUC | UGGGCC | SEQ ID |
| | | VRDERNMLKVVSRMH | GGAUCUGAAGAAGAC | GCAACU | UCCCCC | NO: 50, |
| | | RVSVILKLLVQQFSI | AAGUCCCAGACCGGC | AGCAAG | CAGCCC | ORF |
| | | LETMTALDFNDFREY | GUGAACCGGGCCAGC | CUUUUU | CUCCUC | sequence |
| | | LSPASGFQSLQFRLL | AAGGGUGGCCUGAUC | GUUCUC | CCCUUC | of SEQ |
| | | ENKIGVLQNMRVPYN | UACGGCAACUACCUG | GCC | CUGCAC | ID NO: |
| | | RRHYRDNFKGEENEL | CACCUGGAGAAGGUG | | CCGUAC | 15, and |
| | | LLKSEQEKTLLELVE | CUGAACGCCCAGGAG | | CCCCGU | 3′ UTR |
| | | AWLERTPGLEPHGFN | CUGCAGUCCGAGACC | | GGUCUU | sequence |
| | | FWGKLEKNITRGLEE | AAGGGCAAUAAGAUC | | UGAAUA | of SEQ |
| | | EFIRIQAKEESEEKE | CACGACGAGCACCUG | | AAGUCU | ID NO: |
| | | EQVAEFQKQKEVLLS | UUCAUCAUCACCCAC | | GAGUGG | 108. |
| | | LFDEKRHEHLLSKGE | CAGGCCUACGAGCUG | | GCGGC | |
| | | RRLSYRALQGALMIY | UGGUUCAAGCAGAUC | | | |
| | | FYREEPRFQVPFQLL | CUGUGGGAGCUGGAU | | | |
| | | TSLMDIDSLMTKWRY | AGCGUGAGGGAGAUC | | | |
| | | NHVCMVHRMLGSKAG | UUCCAGAACGGCCAC | | | |
| | | TGGSSGYHYLRSTVS | GUGCGGGACGAGCGC | | | |
| | | DRYKVFVDLFNLSTY | AACAUGCUGAAGGUG | | | |
| | | LIPRHWIPKMNPTIH | GUGAGCCGGAUGCAC | | | |
| | | KFLYTAEYCDSSYFS | CGGGUGUCCGUGAUC | | | |
| | | SDESDGGKPIPNPLL | CUGAAGCUGCUGGUG | | | |
| | | GLDST | CAGCAGUUCAGUAUC | | | |
| | | | CUGGAGACCAUGACC | | | |
| | | | GCCCUGGACUUCAAC | | | |
| | | | GACUUCCGGGAGUAC | | | |
| | | | CUGAGCCCAGCCUCC | | | |
| | | | GGGUUCCAGUCCCUG | | | |
| | | | CAGUUCAGACUGCUG | | | |
| | | | GAGAACAAGAUCGGG | | | |
| | | | GUGCUGCAGAACAUG | | | |
| | | | CGGGUGCCUUACAAC | | | |
| | | | CGGCGGCACUACCGG | | | |
| | | | GACAACUUCAAGGGC | | | |
| | | | GAGGAGAACGAGCUG | | | |
| | | | CUGCUGAAGUCCGAG | | | |
| | | | CAGGAGAAGACCCUG | | | |
| | | | CUGGAGCUGGUGGAG | | | |
| | | | GCCUGGCUGGAGCGG | | | |
| | | | ACACCCGGGCUGGAG | | | |
| | | | CCACACGGGUUCAAC | | | |
| | | | UUCUGGGGCAAGCUG | | | |
| | | | GAGAAGAACAUCACC | | | |
| | | | AGAGGCCUGGAGGAG | | | |
| | | | GAGUUCAUCCGCAUC | | | |
| | | | CAGGCCAAGGAAGAG | | | |
| | | | UCCGAGGAGAAGGAG | | | |
| | | | GAGCAGGUGGCCGAG | | | |
| | | | UUCCAGAAGCAGAAG | | | |
| | | | GAGGUGCUGCUGAGC | | | |
| | | | CUGUUCGACGAGAAG | | | |
| | | | AGGCACGAGCACCUG | | | |
| | | | CUGUCCAAGGGCGAG | | | |
| | | | AGGCGGCUGAGCUAC | | | |
| | | | AGAGCCCUACAGGGC | | | |
| | | | GCCCUGAUGAUCUAC | | | |
| | | | UUCUACAGGGAGGAG | | | |
| | | | CCCCGCUUCCAGGUG | | | |
| | | | CCCUUCCAGCUGCUG | | | |
| | | | ACCAGCCUGAUGGAC | | | |
| | | | AUCGACAGCCUGAUG | | | |
| | | | ACCAAGUGGCGGUAC | | | |
| | | | AACCACGUGUGCAUG | | | |
| | | | GUGCACCGGAUGCUG | | | |
| | | | GGCUCCAAAGCCGGA | | | |
| | | | ACGGGCGGCAGUUCC | | | |
| | | | GGCUACCACUACCUG | | | |
| | | | CGGAGCACCGUGUCC | | | |
| | | | GACCGGUACAAGGUG | | | |
| | | | UUCGUGGACCUGUUC | | | |
| | | | AACCUGAGCACCUAC | | | |
| | | | CUGAUCCCUCGGCAC | | | |
| | | | UGGAUCCCUAAGAUG | | | |
| | | | AACCCCACCAUCCAC | | | |
| | | | AAGUUCCUGUACACC | | | |
| | | | GCCGAGUACUGCGAC | | | |
| | | | AGCAGCUACUUCUCC | | | |
| | | | UCCGACGAGUCCGAC | | | |
| | | | GGCGGAAAGCCCAUC | | | |
| | | | CCCAAUCCCCUGCUG | | | |
| | | | GGCCUGGACUCCACC | | | |
| SEQ ID | | | | | | |
| NO: | | 12 | 13 | 55 | 107 | 328 |
| Human | TDO2 | MGSSKSKPKDPSQRR | AUGGGCAGCAGCAAG | GGAAAU | UGAUAA | SEQ ID |
| TDO2 | G5 | RGGGSSGCPFLGNNF | AGCAAGCCUAAGGAC | AAGAGA | UAGGCU | NO: 328 |
| Variant | Cap C1 | GYTFKKLPVEGSEED | CCUAGCCAGAGAAGA | GAAAAG | GGAGCC | comprises |
| 2.9 | A100-A20- | KSQTGVNRASKGGLI | AGAGGCGGCGGCUCA | AAGAGU | UCGGUG | from |
| | idT nt | YGNYLHLEKVLNAQE | UCCGGCUGCCCUUUC | AAGAAG | GCCAUG | 5′ to 3′ |
| | (SEQ | LQSETKGNKIHDEHL | CUGGGCAACAACUUC | AAAUAU | CUUCUU | end: 5′ |
| | ID NO: | FIITHQAYELWFKQI | GGCUACACCUUCAAG | AAGAGC | GCCCCU | UTR of |
| | 709) | LWELDSVREIFQNGH | AAGCUGCCUGUGGAG | CACC | UGGGCC | SEQ ID |
| | | VRDERNMLKVVSRMH | GGCAGCGAGGAGGAC | | UCCCCC | NO: 55, |
| | | RVSVILKLLVQQFSI | AAGAGCCAGACCGGC | | CAGCCC | ORF |
| | | LETMTALDFNDFREY | GUGAACAGAGCCAGC | | CUCCUC | sequence |
| | | LSPASGFQSLQFRLL | AAGGGCGGCCUGAUC | | CCCUUC | of SEQ |
| | | ENKIGVLQNMRVPYN | UACGGCAACUACCUG | | CUGCAC | ID NO: |
| | | RRHYRDNFKGEENEL | CACCUGGAGAAGGUG | | CCGUAC | 13, and |
| | | LLKSEQEKTLLELVE | CUGAACGCCCAGGAG | | CCCCGU | 3′ UTR |
| | | AWLERTPGLEPHGFN | CUGCAGAGCGAAACU | | GGUCUU | sequence |
| | | FWGKLEKNITRGLEE | AAGGGUAACAAGAUC | | UGAAUA | of SEQ |
| | | EFIRIQAKEESEEKE | CACGACGAGCACCUG | | AAGUCU | ID NO: |
| | | EQVAEFQKQKEVLLS | UUCAUCAUCACCCAC | | GAGUGG | 107. |
| | | LFDEKRHEHLLSKGE | CAGGCCUACGAGCUG | | GCGGC | |
| | | RRLSYRALQGALMIY | UGGUUCAAGCAGAUC | | | |
| | | FYREEPRFQVPFQLL | CUGUGGGAGCUGGAC | | | |
| | | TSLMDIDSLMTKWRY | AGCGUGAGAGAGAUC | | | |
| | | NHVCMVHRMLGSKAG | UUCCAGAACGGCCAC | | | |
| | | TGGSSGYHYLRSTVS | GUCAGGGACGAGAGA | | | |
| | | DRYKVFVDLFNLSTY | AACAUGCUGAAGGUG | | | |
| | | LIPRHWIPKMNPTIH | GUGAGCAGAAUGCAC | | | |
| | | KFLYTAEYCDSSYFS | AGAGUGAGCGUGAUC | | | |
| | | SDESDGGKPIPNPLL | CUGAAGCUGCUGGUG | | | |
| | | GLDST | CAGCAGUUCAGCAUC | | | |
| | | | CUGGAAACAAUGACC | | | |
| | | | GCCCUGGACUUCAAC | | | |
| | | | GACUUCAGAGAGUAC | | | |
| | | | CUGAGCCCUGCCAGC | | | |
| | | | GGCUUCCAGAGCCUU | | | |
| | | | CAGUUCAGACUGCUG | | | |
| | | | GAGAAUAAGAUCGGC | | | |
| | | | GUGCUGCAGAACAUG | | | |
| | | | AGAGUGCCUUACAAC | | | |
| | | | AGAAGACACUACAGA | | | |
| | | | GACAACUUCAAGGGC | | | |
| | | | GAGGAGAACGAGCUG | | | |
| | | | CUGCUCAAGAGCGAG | | | |
| | | | CAGGAGAAGACCCUC | | | |
| | | | UUGGAACUGGUGGAG | | | |
| | | | GCCUGGCUGGAGAGA | | | |
| | | | ACCCCUGGCCUGGAG | | | |
| | | | CCUCACGGCUUCAAC | | | |
| | | | UUCUGGGGCAAGCUU | | | |
| | | | GAGAAGAACAUCACC | | | |
| | | | AGAGGACUCGAAGAG | | | |
| | | | GAGUUCAUCAGAAUC | | | |
| | | | CAGGCCAAGGAGGAG | | | |
| | | | UCAGAGGAGAAGGAG | | | |
| | | | GAACAGGUGGCCGAG | | | |
| | | | UUCCAGAAGCAGAAG | | | |
| | | | GAAGUGCUGCUAAGC | | | |
| | | | CUGUUCGACGAGAAG | | | |
| | | | AGACACGAACACCUG | | | |
| | | | CUGUCGAAGGGAGAA | | | |
| | | | AGAAGACUGAGCUAC | | | |
| | | | CGUGCUUUGCAGGGC | | | |
| | | | GCCCUGAUGAUCUAC | | | |
| | | | UUCUACAGGGAGGAG | | | |
| | | | CCUAGAUUCCAGGUG | | | |
| | | | CCUUUCCAGCUGCUG | | | |
| | | | ACCAGCCUGAUGGAC | | | |
| | | | AUCGACUCUUUGAUG | | | |
| | | | ACCAAGUGGAGAUAC | | | |
| | | | AACCACGUGUGCAUG | | | |
| | | | GUGCACAGAAUGCUC | | | |
| | | | GGCUCCAAGGCCGGC | | | |
| | | | ACCGGUGGUAGCUCC | | | |
| | | | GGAUACCACUACCUG | | | |
| | | | AGAAGCACCGUGAGC | | | |
| | | | GACAGAUACAAGGUG | | | |
| | | | UUCGUGGACCUCUUC | | | |
| | | | AACCUCAGCACCUAC | | | |
| | | | CUGAUCCCUAGACAC | | | |
| | | | UGGAUCCCUAAGAUG | | | |
| | | | AACCCUACCAUCCAC | | | |
| | | | AAGUUCCUGUACACC | | | |
| | | | GCCGAGUACUGCGAC | | | |
| | | | AGCAGCUACUUCAGC | | | |
| | | | AGCGACGAGAGCGAC | | | |
| | | | GGCGGCAAGCCUAUC | | | |
| | | | CCUAACCCUCUGCUG | | | |
| | | | GGCCUGGACAGCACC | | | |
| SEQ ID | | | | | | |
| NO: | | 12 | 14 | 50 | 140 | 329 |
| Human | TDO2 | MGSSKSKPKDPSQRR | AUGGGCAGCAGCAAG | GGAAAU | UAAGUC | SEQ ID |
| TDO2 | G5 | RGGGSSGCPFLGNNF | UCCAAGCCCAAGGAC | CGCAAA | UCCGCU | NO: 329 |
| Variant | Cap C1 | GYTFKKLPVEGSEED | CCUUCCCAGAGAAGG | AUUUGC | GGAGCC | comprises |
| 2.10 | A100-A20- | KSQTGVNRASKGGLI | AGGGGUGGCGGCUCU | UCUUCG | UCGGUG | from |
| | idT nt | YGNYLHLEKVLNAQE | AGCGGCUGCCCCUUC | CGUUAG | GCCUAG | 5′ to 3′ |
| | (SEQ | LQSETKGNKIHDEHL | CUGGGCAACAACUUC | AUUUCU | CUUCUU | end: 5′ |
| | ID NO: | FIITHQAYELWFKQI | GGCUACACCUUCAAG | UUUAGU | GCCCCU | UTR of |
| | 709) | LWELDSVREIFQNGH | AAGCUGCCCGUGGAG | UUUCUC | UGGGCC | SEQ ID |
| | | VRDERNMLKVVSRMH | GGCAGCGAGGAGGAC | GCAACU | UCCCCC | NO: 50, |
| | | RVSVILKLLVQQFSI | AAGUCCCAGACCGGC | AGCAAG | CAGCCC | ORF |
| | | LETMTALDFNDFREY | GUGAACCGGGCCAGC | CUUUUU | CUCCUC | sequence |
| | | LSPASGFQSLQFRLL | AAGGGUGGCCUGAUC | GUUCUC | CCCUUC | of SEQ |
| | | ENKIGVLQNMRVPYN | UACGGCAACUACCUG | GCC | CUGCAC | ID NO: |
| | | RRHYRDNFKGEENEL | CACCUGGAGAAGGUG | | CCGUAC | 14, and |
| | | LLKSEQEKTLLELVE | CUGAACGCCCAGGAG | | CCCCGU | 3′ UTR |
| | | AWLERTPGLEPHGFN | CUGCAGUCCGAGACC | | GGUCUU | sequence |
| | | FWGKLEKNITRGLEE | AAGGGCAAUAAGAUC | | UGAAUA | of SEQ |
| | | EFIRIQAKEESEEKE | CACGACGAGCACCUG | | AAGUCU | ID NO: |
| | | EQVAEFQKQKEVLLS | UUCAUCAUCACCCAC | | GAGUGG | 140. |
| | | LFDEKRHEHLLSKGE | CAGGCCUACGAGCUG | | GCGGC | |
| | | RRLSYRALQGALMIY | UGGUUCAAGCAGAUC | | | |
| | | FYREEPRFQVPFQLL | CUGUGGGAGCUGGAU | | | |
| | | TSLMDIDSLMTKWRY | AGCGUGAGGGAGAUC | | | |
| | | NHVCMVHRMLGSKAG | UUCCAGAACGGCCAC | | | |
| | | TGGSSGYHYLRSTVS | GUGCGGGACGAGCGC | | | |
| | | DRYKVFVDLFNLSTY | AACAUGCUGAAGGUG | | | |
| | | LIPRHWIPKMNPTIH | GUGAGCCGGAUGCAC | | | |
| | | KFLYTAEYCDSSYFS | CGGGUGUCCGUGAUC | | | |
| | | SDESDGGKPIPNPLL | CUGAAGCUGCUGGUG | | | |
| | | GLDST | CAGCAGUUCAGUAUC | | | |
| | | | CUGGAGACCAUGACC | | | |
| | | | GCCCUGGACUUCAAC | | | |
| | | | GACUUCCGGGAGUAC | | | |
| | | | CUGAGCCCAGCCUCC | | | |
| | | | GGGUUCCAGUCCCUG | | | |
| | | | CAGUUCAGACUGCUG | | | |
| | | | GAGAACAAGAUCGGG | | | |
| | | | GUGCUGCAGAACAUG | | | |
| | | | CGGGUGCCUUACAAC | | | |
| | | | CGGCGGCACUACCGG | | | |
| | | | GACAACUUCAAGGGC | | | |
| | | | GAGGAGAACGAGCUG | | | |
| | | | CUGCUGAAGUCCGAG | | | |
| | | | CAGGAGAAGACCCUG | | | |
| | | | CUGGAGCUGGUGGAG | | | |
| | | | GCCUGGCUGGAGCGG | | | |
| | | | ACACCCGGGCUGGAG | | | |
| | | | CCACACGGGUUCAAC | | | |
| | | | UUCUGGGGCAAGCUG | | | |
| | | | GAGAAGAACAUCACC | | | |
| | | | AGAGGCCUGGAGGAG | | | |
| | | | GAGUUCAUCCGCAUC | | | |
| | | | CAGGCCAAGGAAGAG | | | |
| | | | UCCGAGGAGAAGGAG | | | |
| | | | GAGCAGGUGGCCGAG | | | |
| | | | UUCCAGAAGCAGAAG | | | |
| | | | GAGGUGCUGCUGAGC | | | |
| | | | CUGUUCGACGAGAAG | | | |
| | | | AGGCACGAGCACCUG | | | |
| | | | CUGUCCAAGGGCGAG | | | |
| | | | AGGCGGCUGAGCUAC | | | |
| | | | AGAGCCCUACAGGGC | | | |
| | | | GCCCUGAUGAUCUAC | | | |
| | | | UUCUACAGGGAGGAG | | | |
| | | | CCCCGCUUCCAGGUG | | | |
| | | | CCCUUCCAGCUGCUG | | | |
| | | | ACCAGCCUGAUGGAC | | | |
| | | | AUCGACAGCCUGAUG | | | |
| | | | ACCAAGUGGCGGUAC | | | |
| | | | AACCACGUGUGCAUG | | | |
| | | | GUGCACCGGAUGCUG | | | |
| | | | GGCUCCAAAGCCGGA | | | |
| | | | ACGGGCGGCAGUUCC | | | |
| | | | GGCUACCACUACCUG | | | |
| | | | CGGAGCACCGUGUCC | | | |
| | | | GACCGGUACAAGGUG | | | |
| | | | UUCGUGGACCUGUUC | | | |
| | | | AACCUGAGCACCUAC | | | |
| | | | CUGAUCCCUCGGCAC | | | |
| | | | UGGAUCCCUAAGAUG | | | |
| | | | AACCCCACCAUCCAC | | | |
| | | | AAGUUCCUGUACACC | | | |
| | | | GCCGAGUACUGCGAC | | | |
| | | | AGCAGCUACUUCUCC | | | |
| | | | UCCGACGAGUCCGAC | | | |
| | | | GGCGGAAAGCCCAUC | | | |
| | | | CCCAAUCCCCUGCUG | | | |
| | | | GGCCUGGACUCCACC | | | |
| SEQ ID | | | | | | |
| NO: | | 20 | 21 | 56 | 108 | 330 |
| Human | TDO2 | MSGCPFLGNNFGYTF | AUGAGCGGCUGCCCC | GGAAAU | UGAUAA | SEQ ID |
| TDO2 | G5 | KKLPVEGSEEDKSQT | UUCCUCGGCAACAAC | AAGAGA | UAGGCU | NO: 330 |
| Variant | Cap C1 | GVNRASKGGLIYGNY | UUCGGCUACACCUUC | GAAAAG | GGAGCC | comprises |
| 3.1 | Poly A | LHLEKVLNAQELQSE | AAGAAGCUGCCCGUG | AAGAGU | UCGGUG | from |
| | tail: | TKGNKIHDEHLFIIT | GAGGGCAGCGAGGAG | AAGAAG | GCCUAG | 5′ to 3′ |
| | 100 nt | HQAYELWFKQILWEL | GACAAGAGCCAGACC | AAAUAU | CUUCUU | end: 5′ |
| | (SEQ ID | DSVREIFQNGHVRDE | GGCGUGAACCGGGCC | AAGACC | GCCCCU | UTR of |
| | NO: 502) | RNMLKVVSRMHRVSV | AGCAAGGGAGGCCUG | CCGGCG | UGGGCC | SEQ ID |
| | | ILKLLVQQFSILETM | AUCUACGGCAACUAC | CCGCCA | UCCCCC | NO: 56, |
| | | TALDFNDFREYLSPA | CUGCACCUGGAGAAG | CC | CAGCCC | ORF |
| | | SGFQSLQFRLLENKI | GUGCUGAACGCCCAG | | CUCCUC | sequence |
| | | GVLQNMRVPYNRRHY | GAGCUGCAGAGCGAG | | CCCUUC | of SEQ |
| | | RDNFKGEENELLLKS | ACCAAGGGCAACAAG | | CUGCAC | ID NO: |
| | | EQEKTLLELVEAWLE | AUCCACGACGAGCAC | | CCGUAC | 21, and |
| | | RTPGLEPHGFNFWGK | CUGUUCAUCAUCACC | | CCCCGU | 3′ UTR |
| | | LEKNITRGLEEEFIR | CACCAGGCCUACGAG | | GGUCUU | sequence |
| | | IQAKEESEEKEEQVA | CUGUGGUUCAAGCAG | | UGAAUA | of SEQ |
| | | EFQKQKEVLLSLFDE | AUCCUGUGGGAGCUG | | AAGUCU | ID NO: |
| | | KRHEHLLSKGERRLS | GACAGCGUGCGGGAG | | GAGUGG | 108. |
| | | YRALQGALMIYFYRE | AUCUUCCAGAACGGC | | GCGGC | |
| | | EPRFQVPFQLLTSLM | CACGUGCGGGACGAG | | | |
| | | DIDSLMTKWRYNHVC | CGGAACAUGCUGAAG | | | |
| | | MVHRMLGSKAGTGGS | GUGGUGAGCCGGAUG | | | |
| | | SGYHYLRSTVSDRYK | CACCGGGUGAGCGUG | | | |
| | | VFVDLFNLSTYLIPR | AUCCUGAAGCUGCUG | | | |
| | | HWIPKMNPTIHKFLY | GUGCAGCAGUUCAGC | | | |
| | | TAEYCDSSYFSSDES | AUCCUGGAGACCAUG | | | |
| | | DGGGGGSGGGGSYRL | ACCGCCCUGGACUUC | | | |
| | | KKISKEEKTPGCVKI | AACGACUUCCGGGAG | | | |
| | | KKC | UACUUAAGCCCCGCC | | | |
| | | | UCCGGCUUUCAGAGC | | | |
| | | | CUGCAGUUCCGGCUG | | | |
| | | | CUGGAGAACAAGAUC | | | |
| | | | GGCGUGCUGCAGAAC | | | |
| | | | AUGCGGGUGCCCUAC | | | |
| | | | AACCGGCGGCACUAC | | | |
| | | | CGGGACAACUUCAAG | | | |
| | | | GGCGAGGAGAACGAG | | | |
| | | | CUGCUGCUAAAGAGC | | | |
| | | | GAGCAGGAGAAGACC | | | |
| | | | CUGCUGGAGCUGGUG | | | |
| | | | GAGGCCUGGCUGGAG | | | |
| | | | CGGACACCCGGCCUG | | | |
| | | | GAACCCCACGGCUUC | | | |
| | | | AACUUCUGGGGCAAG | | | |
| | | | CUGGAGAAGAACAUC | | | |
| | | | ACCCGGGGACUGGAG | | | |
| | | | GAGGAGUUCAUCCGG | | | |
| | | | AUCCAGGCCAAGGAG | | | |
| | | | GAGAGCGAAGAGAAG | | | |
| | | | GAGGAGCAGGUGGCC | | | |
| | | | GAGUUCCAGAAGCAG | | | |
| | | | AAGGAGGUGCUGCUG | | | |
| | | | AGCCUGUUCGACGAG | | | |
| | | | AAGCGGCACGAGCAU | | | |
| | | | CUUCUGUCGAAGGGC | | | |
| | | | GAACGGCGGCUGAGC | | | |
| | | | UAUCGGGCCCUGCAA | | | |
| | | | GGAGCCCUGAUGAUC | | | |
| | | | UACUUCUACCGGGAG | | | |
| | | | GAGCCCCGGUUCCAG | | | |
| | | | GUGCCCUUCCAGCUG | | | |
| | | | CUGACCAGCCUGAUG | | | |
| | | | GACAUCGAUAGCCUG | | | |
| | | | AUGACCAAGUGGCGG | | | |
| | | | UACAACCACGUGUGC | | | |
| | | | AUGGUGCACCGGAUG | | | |
| | | | CUGGGCAGCAAGGCC | | | |
| | | | GGCACCGGAGGAAGC | | | |
| | | | AGCGGCUACCACUAC | | | |
| | | | CUGCGGAGCACCGUG | | | |
| | | | AGCGACCGGUACAAG | | | |
| | | | GUGUUCGUGGACCUG | | | |
| | | | UUCAACCUGAGCACC | | | |
| | | | UACCUGAUUCCCCGG | | | |
| | | | CACUGGAUCCCCAAG | | | |
| | | | AUGAACCCCACCAUC | | | |
| | | | CACAAGUUCCUGUAC | | | |
| | | | ACCGCCGAGUACUGC | | | |
| | | | GACAGCAGCUACUUC | | | |
| | | | AGCAGCGACGAAUCA | | | |
| | | | GACGGCGGCGGUGGA | | | |
| | | | GGAUCAGGAGGCGGC | | | |
| | | | GGAAGCUACCGGCUG | | | |
| | | | AAGAAGAUCAGCAAG | | | |
| | | | GAAGAGAAGACUCCC | | | |
| | | | GGCUGCGUGAAGAUC | | | |
| | | | AAGAAGUGC | | | |
| SEQ ID | | | | | | |
| NO: | | 22 | 23 | 56 | 108 | 331 |
| Human | TDO2 | MGSSKSKPKDPSQRR | AUGGGCAGCAGCAAG | GGAAAU | UGAUAA | SEQ ID |
| TDO2 | G5 | RGGGSSGCPFLGNNF | AGCAAGCCUAAGGAC | AAGAGA | UAGGCU | NO: 331 |
| Variant | Cap C1 | GYTFKKLPVEGSEED | CCUAGCCAGAGAAGA | GAAAAG | GGAGCC | comprises |
| 4.1 | Poly A | KSQTGVNRASKGGLI | AGAGGCGGAGGCUCC | AAGAGU | UCGGUG | from |
| | tail: | YGNYLHLEKVLNAQE | AGCGGCUGCCCCUUC | AAGAAG | GCCUAG | 5′ to 3′ |
| | 100 nt | LQSETKGNKIHDEHL | CUCGGCAACAACUUC | AAAUAU | CUUCUU | end: 5′ |
| | (SEQ ID | FIITHQAYELWFKQI | GGCUACACCUUCAAG | AAGACC | GCCCCU | UTR of |
| | NO: 502) | LWELDSVREIFQNGH | AAGCUGCCCGUGGAG | CCGGCG | UGGG | SEQ ID |
| | | VRDERNMLKVVSRMH | GGCAGCGAGGAGGAC | CCGCCA | | NO: 56, |
| | | RVSVILKLLVQQFSI | AAGAGCCAGACCGGC | CCCCUC | | ORF |
| | | LETMTALDFNDFREY | GUGAACCGGGCCAGC | CCCCCA | | sequence |
| | | LSPASGFQSLQFRLL | AAGGGAGGCCUGAUC | GCCCCU | | of SEQ |
| | | ENKIGVLQNMRVPYN | UACGGCAACUACCUG | CCUCCC | | ID NO: |
| | | RRHYRDNFKGEENEL | CACCUGGAGAAGGUG | CUUCCU | | 23, and |
| | | LLKSEQEKTLLELVE | CUGAACGCCCAGGAG | GCACCC | | 3′ UTR |
| | | AWLERTPGLEPHGFN | CUGCAGAGCGAGACC | GUACCC | | sequence |
| | | FWGKLEKNITRGLEE | AAGGGCAACAAGAUC | CCGUGG | | of SEQ |
| | | EFIRIQAKEESEEKE | CACGACGAGCACCUG | UCUUUG | | ID NO: |
| | | EQVAEFQKQKEVLLS | UUCAUCAUCACCCAC | AAUAAA | | 108. |
| | | LFDEKRHEHLLSKGE | CAGGCCUACGAGCUG | GUCUGA | | |
| | | RRLSYRALQGALMIY | UGGUUCAAGCAGAUC | GUGGGC | | |
| | | FYREEPRFQVPFQLL | CUGUGGGAGCUGGAC | GGC | | |
| | | TSLMDIDSLMTKWRY | AGCGUGCGGGAGAUC | | | |
| | | NHVCMVHRMLGSKAG | UUCCAGAACGGCCAC | | | |
| | | TGGSSGYHYLRSTVS | GUGCGGGACGAGCGG | | | |
| | | DRYKVFVDLFNLSTY | AACAUGCUGAAGGUG | | | |
| | | LIPRHWIPKMNPTIH | GUGAGCCGGAUGCAC | | | |
| | | | CGGGUGAGCGUGAUC | | | |
| | | | CUGAAGCUGCUGGUG | | | |
| | | | CAGCAGUUCAGCAUC | | | |
| | | | CUGGAGACCAUGACC | | | |
| | | | GCCCUGGACUUCAAC | | | |
| | | | GACUUCCGGGAGUAC | | | |
| | | | UUAAGCCCCGCCUCC | | | |
| | | | GGCUUUCAGAGCCUG | | | |
| | | | CAGUUCCGGCUGCUG | | | |
| | | | GAGAACAAGAUCGGC | | | |
| | | | GUGCUGCAGAACAUG | | | |
| | | | CGGGUGCCCUACAAC | | | |
| | | | CGGCGGCACUACCGG | | | |
| | | | GACAACUUCAAGGGC | | | |
| | | | GAGGAGAACGAGCUG | | | |
| | | | CUGCUAAAGAGCGAG | | | |
| | | | CAGGAGAAGACCCUG | | | |
| | | | CUGGAGCUGGUGGAG | | | |
| | | | GCCUGGCUGGAGCGG | | | |
| | | | ACACCCGGCCUGGAA | | | |
| | | | CCCCACGGCUUCAAC | | | |
| | | | UUCUGGGGCAAGCUG | | | |
| | | | GAGAAGAACAUCACC | | | |
| | | | CGGGGACUGGAGGAG | | | |
| | | | GAGUUCAUCCGGAUC | | | |

Human IDO2 Constructs

| SEQ ID | | | | | | |
|---|---|---|---|---|---|---|
| NO: | | 8 | 9 | 55 | 107 | 332 |
| Human | IDO2 | MLHFHYYDTSNKIME | AUGCUCCACUUCCAC | GGAAAU | UGAUAA | SEQ ID |
| IDO2 | G5 | PHRPNVKTAVPLSLE | UACUACGACACCAGC | AAGAGA | UAGGCU | NO: 332 |
| Variant | Cap C1 | SYHISEEYGFLLPDS | AACAAGAUCAUGGAG | GAAAAG | GGAGCC | comprises |
| 1.1 | Poly A | LKELPDHYRPWMEIA | CCUCACAGACCUAAC | AAGAGU | UCGGUG | from |
| | tail: | NKLPQLIDAHQLQAH | GUGAAGACCGCCGUG | AAGAAG | GCCAUG | 5′ to 3′ |
| | 100 nt | VDKMPLLSCQFLKGH | CCUCUCAGCCUUGAG | AAAUAU | CUUCUU | end: 5′ |
| | (SEQ ID | REQRLAHLVLSFLTM | AGCUACCACAUCAGC | AAGAGC | GCCCCU | UTR of |
| | NO: 502) | GYVWQEGEAQPAEVL | GAGGAGUACGGCUUC | CACC | UGGGCC | SEQ ID |
| | | PRNLALPFVEVSRNL | CUCUUACCAGACAGC | | UCCCCC | NO: 55, |
| | | GLPPILVHSDLVLTN | UUGAAGGAACUACCG | | CAGCCC | ORF |
| | | WTKKDPDGFLEIGNL | GACCACUACAGACCU | | CUCCUC | sequence |
| | | ETIISFPGGESLHGF | UGGAUGGAGAUCGCC | | CCCUUC | of SEQ |
| | | ILVTALVEKEAVPGI | AACAAGCUGCCUCAG | | CUGCAC | ID NO: |
| | | KALVQATNAILQPNQ | CUGAUCGACGCCCAC | | CCGUAC | 9, and |
| | | EALLQALQRLRLSIQ | CAGCUGCAGGCCCAC | | CCCCGU | 3′ UTR |
| | | DITKTLGQMHDYVDP | GUGGACAAGAUGCCU | | GGUCUU | sequence |
| | | DIFYAGIRIFLSGWK | CUGCUGAGCUGCCAG | | UGAAUA | of SEQ |
| | | DNPAMPAGLMYEGVS | UUCCUGAAGGGCCAC | | AAGUCU | ID NO: |
| | | QEPLKYSGGSAAQST | AGAGAGCAGAGACUG | | GAGUGG | 107. |
| | | VLHAFDEFLGIRHSK | GCCCACCUGGUCCUC | | GCGGC | |
| | | ESGDFLYRMRDYMPP | AGCUUCCUGACCAUG | | | |
| | | SHKAFIEDIHSAPSL | GGCUACGUGUGGCAG | | | |
| | | RDYILSSGQDHLLTA | GAGGGCGAGGCCCAG | | | |
| | | YNQCVQALAELRSYH | CCUGCCGAGGUGCUG | | | |
| | | ITMVTKYLITAAAKA | CCUAGAAACCUGGCC | | | |
| | | KHGKPNHLPGPPQAL | CUGCCUUUCGUGGAG | | | |
| | | KDRGTGGTAVMSFLK | GUGAGCCGGAACCUG | | | |
| | | SVRDKTLESILHPRG | GGCCUGCCUCCUAUC | | | |
| | | | CUGGUGCACAGCGAU | | | |
| | | | CUUGUCUUGACAAAC | | | |
| | | | UGGACCAAGAAGGAC | | | |
| | | | CCUGACGGAUUCUUG | | | |
| | | | GAGAUAGGCAACCUG | | | |
| | | | GAAACAAUCAUUAGC | | | |
| | | | UUCCCUGGCGGCGAG | | | |
| | | | AGCCUGCACGGCUUC | | | |
| | | | AUCCUCGUGACCGCC | | | |
| | | | CUGGUGGAGAAGGAG | | | |
| | | | GCAGUACCUGGCAUC | | | |
| | | | AAGGCCCUCGUGCAG | | | |
| | | | GCCACCAACGCCAUC | | | |
| | | | CUGCAGCCUAACCAG | | | |
| | | | GAGGCCCUGCUUCAA | | | |
| | | | GCUCUCCAGCGACUC | | | |
| | | | CGCCUGAGCAUCCAG | | | |
| | | | GACAUCACCAAGACC | | | |
| | | | CUGGGCCAGAUGCAC | | | |
| | | | GACUACGUCGAUCCU | | | |
| | | | GAUAUCUUCUACGCC | | | |
| | | | GGCAUCAGAAUCUUC | | | |
| | | | CUGAGCGGCUGGAAG | | | |
| | | | GACAACCCUGCCAUG | | | |
| | | | CCUGCCGGCCUGAUG | | | |
| | | | UACGAGGGCGUGAGC | | | |
| | | | CAGGAGCCUCUGAAG | | | |
| | | | UACAGCGGCGGCAGC | | | |
| | | | GCCGCCCAGAGCACC | | | |
| | | | GUGCUGCACGCCUUC | | | |
| | | | GACGAGUUCCUGGGU | | | |
| | | | AUUCGCCACAGCAAG | | | |
| | | | GAGAGCGGCGACUUC | | | |
| | | | CUGUACAGAAUGAGA | | | |
| | | | GACUACAUGCCGCCA | | | |
| | | | AGCCACAAGGCCUUC | | | |
| | | | AUCGAGGACAUCCAC | | | |
| | | | AGCGCCCCUAGCCUC | | | |
| | | | CGGGACUAUAUCCUG | | | |
| | | | AGCAGCGGCCAGGAC | | | |
| | | | CACCUGCUGACCGCC | | | |
| | | | UACAACCAGUGUGUU | | | |
| | | | CAGGCCCUAGCCGAG | | | |
| | | | CUGAGAAGUUAUCAC | | | |
| | | | AUUACUAUGGUGACC | | | |
| | | | AAGUACCUGAUCACC | | | |
| | | | GCCGCAGCAAAGGCC | | | |
| | | | AAGCACGGCAAGCCA | | | |
| | | | AACCACCUCCCUGGA | | | |
| | | | CCUCCUCAGGCGCUC | | | |
| | | | AAGGACAGAGGCACC | | | |
| | | | GGCGGCACAGCGGUA | | | |
| | | | AUGAGUUUCCUUAAG | | | |
| | | | AGCGUGAGAGAUAAG | | | |
| | | | ACCCUAGAGUCCAUC | | | |
| | | | UUGCACCCGCGGGGC | | | |

Notes:
“G5” indicates that all uracils (U) in the mRNA are replaced by N1-methylpseudouracils.
Membrane anchoring moiety is underlined

### LNPs for Therapy

[0830] Disclosed herein is, inter alia, an LNP composition comprising a first polynucleotide encoding (i) a metabolic reprogramming molecule and a (ii) membrane anchoring moiety that can be administered alone or in combination with an additional agent, e.g., a standard of care therapy. In an embodiment, the additional agent is a polypeptide, e.g., a protein, a fusion protein, a soluble protein, or an antibody (e.g., an antibody fragment, a Fab, an scFv, a single domain Ab, a humanized antibody, a bispecific antibody and/or a multispecific antibody). In an embodiment, the LNP composition and the additional agent are in the same composition or in separate compositions. In an embodiment, the LNP composition and the additional agent are administered substantially simultaneously or sequentially.

### Lipid Content of LNPs

[0831] As set forth above, with respect to lipids, LNPs disclosed herein comprise an (i) ionizable lipid; (ii) sterol or other structural lipid; (iii) a non-cationic helper lipid or phospholipid; a (iv) PEG lipid. These categories of lipids are set forth in more detail below.

### Ionizable Lipids

[0832] The lipid nanoparticles of the present disclosure include one or more ionizable lipids. In certain embodiments, the ionizable lipids of the disclosure comprise a central amine moiety and at least one biodegradable group. The ionizable lipids described herein may be advantageously used in lipid nanoparticles of the disclosure for the delivery of nucleic acid molecules to mammalian cells or organs. The structures of ionizable lipids set forth below include the prefix I to distinguish them from other lipids of the invention.

[0833] In some aspects, the disclosure relates to a compound of Formula (I):

[chemical structure]

or its N-oxide, or a salt or isomer thereof,
[0834] wherein R′^{a} is R′^{branched}; wherein
   [0835] R′^{branched} is:

[chemical structure]

wherein [symbol] denotes a point of attachment;
[0836] wherein R^{aα}, R^{aβ}, R^{aγ}, and R^{aδ} are each independently selected from the group consisting of H, C₂₋₁₂ alkyl, and C₂₋₁₂ alkenyl;
[0837] R² and R³ are each independently selected from the group consisting of C₁₋₁₄ alkyl and C₂₋₁₄ alkenyl;
[0838] R⁴ is selected from the group consisting of —(CH₂)ₙOH, wherein n is selected from the group consisting of 1, 2, 3, 4, and 5, and

[chemical structure]

[0839] wherein [symbol] denotes a point of attachment; wherein
[0840] R¹⁰ is N(R)₂; each R is independently selected from the group consisting of C₁₋₆ alkyl, C₂₋₃ alkenyl, and H; and n2 is selected from the group consisting of 1, 2, 3, 4, 5, 6, 7, 8, 9, and 10;
[0841] each R⁵ is independently selected from the group consisting of C₁₋₃ alkyl, C₂₋₃ alkenyl, and H;
[0842] each R⁶ is independently selected from the group consisting of C₁₋₃ alkyl, C₂₋₃ alkenyl, and H;
[0843] M and M′ are each independently selected from the group consisting of —C(O)O— and —OC(O)—;
[0844] R′ is a C₁₋₁₂ alkyl or C₂₋₁₂ alkenyl;
[0845] l is selected from the group consisting of 1, 2, 3, 4, and 5; and
[0846] m is selected from the group consisting of 5, 6, 7, 8, 9, 10, 11, 12, and 13.

[0847] In some embodiments of the compounds of Formula (I), R′^{a} is R′^{branched}; R′^{branched} is

[chemical structure]

[symbol]

denotes a point of attachment; R^{aα}, R^{aβ}, R^{aγ}, and R^{aδ} are each H; R² and R³ are each C₁₋₁₄ alkyl; R⁴ is —(CH₂)ₙOH; n is 2; each R⁵ is H; each R⁶ is H; M and M′ are each —C(O)O—; R′ is a C₁₋₁₂ alkyl; 1 is 5; and m is 7.

[0848] In some embodiments of the compounds of Formula (I), R′^{a} is R′^{branched}; R′^{branched} is

[chemical structure]

[symbol]

denotes a point of attachment; R^{aα}, R^{aβ}, R^{aγ}, and R^{aδ} are each H; R² and R³ are each C₁₋₁₄ alkyl; R⁴ is —(CH₂)ₙOH; n is 2; each R⁵ is H; each R⁶ is H; M and M′ are each —C(O)O—; R′ is a C₁₋₁₂ alkyl; 1 is 3; and m is 7.

[0849] In some embodiments of the compounds of Formula (I), R′^{a} is R′^{branched}; R′^{branched} is

[chemical structure]

[symbol]

denotes a point of attachment; R^{aΔ} is C₂₋₁₂ alkyl; R^{aβ}, R^{aγ}, and R^{aδ} are each H; R² and R³ are each C₁₋₁₄ alkyl; R⁴ is

[chemical structure]

R¹⁰ is NH(C₁₋₆ alkyl); n2 is 2; R⁵ is H; each R⁶ is H; M and M′ are each —C(O)O—; R′ is a C₁₋₁₂ alkyl; 1 is 5; and m is 7.

[0850] In some embodiments of the compounds of Formula (I), R′^{a} is R′^{branched}; R′^{branched} is

[chemical structure]

[symbol]

denotes a point of attachment; R^{aΔ}, R^{aβ}, and R^{aδ} are each H; R^{aγ} is C₂₋₁₂ alkyl; R² and R³ are each C₁₋₁₄ alkyl; R⁴ is —(CH₂)ₙOH; n is 2; each R⁵ is H; each R⁶ is H; M and M′ are each —C(O)O—; R′ is a C₁₋₁₂ alkyl; 1 is 5; and m is 7.

[0851] In some embodiments, the compound of Formula (I) is selected from:

[chemical structure]

[0852] In some embodiments, the compound of Formula (I) is:

[chemical structure]

[0853] In some embodiments, the compound of Formula (I) is:

[chemical structure]

[0854] In some embodiments, the compound of Formula (I) is:

[chemical structure]

[0855] In some embodiments, the compound of Formula (I) is:

[chemical structure]

[0856] In some aspects, the disclosure relates to a compound of Formula (I-a):

[chemical structure]

or its N-oxide, or a salt or isomer thereof,
[0857] wherein R′^{a} is R′^{branched}; wherein
   [0858] R′^{branched} is wherein

[chemical structure]

[symbol]

denotes a point of attachment;
[0859] wherein R^{aβ}, R^{aβ}, and R^{aδ} are each independently selected from the group consisting of H, C₂₋₁₂ alkyl, and C₂₋₁₂ alkenyl;
[0860] R² and R³ are each independently selected from the group consisting of C₁₋₁₄ alkyl and C₂₋₁₄ alkenyl;
[0861] R⁴ is selected from the group consisting of —(CH₂)ₙOH, wherein n is selected from the group consisting of 1, 2, 3, 4, and 5, and

[chemical structure]

[0862] wherein [symbol] denotes a point of attachment; wherein
[0863] R¹⁰ is N(R)₂; each R is independently selected from the group consisting of C₁₋₆ alkyl, C₂₋₃ alkenyl, and H; and n2 is selected from the group consisting of 1, 2, 3, 4, 5, 6, 7, 8, 9, and 10;
[0864] each R⁵ is independently selected from the group consisting of C₁₋₃ alkyl, C₂₋₃ alkenyl, and H;
[0865] each R⁶ is independently selected from the group consisting of C₁₋₃ alkyl, C₂₋₃ alkenyl, and H;
[0866] M and M′ are each independently selected from the group consisting of —C(O)O— and —OC(O)—;
[0867] R′ is a C₁₋₁₂ alkyl or C₂₋₁₂ alkenyl;
[0868] l is selected from the group consisting of 1, 2, 3, 4, and 5; and
[0869] m is selected from the group consisting of 5, 6, 7, 8, 9, 10, 11, 12, and 13.

[0870] In some aspects, the disclosure relates to a compound of Formula (I-b):

[chemical structure]

or its N-oxide, or a salt or isomer thereof,
[0871] wherein R′^{a} is R′^{branched}; wherein
   [0872] R′^{branched} is

[chemical structure]

wherein [symbol] denotes a point of attachment;
[0873] wherein R^{aΔ}, R^{aβ}, R^{aγ}, and R^{aδ} are each independently selected from the group consisting of H, C₂₋₁₂ alkyl, and C₂₋₁₂ alkenyl;
[0874] R² and R³ are each independently selected from the group consisting of C₁₋₁₄ alkyl and C₂₋₁₄ alkenyl;
[0875] R⁴ is —(CH₂)ₙOH, wherein n is selected from the group consisting of 1, 2, 3, 4, and 5;
[0876] each R⁵ is independently selected from the group consisting of C₁₋₃ alkyl, C₂₋₃ alkenyl, and H;
[0877] each R⁶ is independently selected from the group consisting of C₁₋₃ alkyl, C₂₋₃ alkenyl, and H;
[0878] M and M′ are each independently selected from the group consisting of —C(O)O— and —OC(O)—;
[0879] R′ is a C₁₋₁₂ alkyl or C₂₋₁₂ alkenyl;
[0880] l is selected from the group consisting of 1, 2, 3, 4, and 5; and
[0881] m is selected from the group consisting of 5, 6, 7, 8, 9, 10, 11, 12, and 13.

[0882] In some embodiments of Formula (I) or (I-b), R′^{a} is R′^{branched}; R′^{branched} is

[chemical structure]

[symbol]

denotes a point of attachment; R^{aβ}, R^{aγ}, and R^{aδ} are each H; R² and R³ are each C₁₋₁₄ alkyl; R⁴ is —(CH₂)ₙOH; n is 2; each R⁵ is H; each R⁶ is H; M and M′ are each —C(O)O—; R′ is a C₁₋₁₂ alkyl; l is 5; and m is 7.

[0883] In some embodiments of Formula (I) or (I-b), R′^{a} is R′^{branched}; R′^{branched} is

[chemical structure]

[symbol]

denotes a point of attachment; R^{aβ}, R^{aγ}, and R^{aδ} are each H; R² and R³ are each C₁₋₁₄ alkyl; R⁴ is —(CH₂)ₙOH; n is 2; each R⁵ is H; each R⁶ is H; M and M′ are each —C(O)O—; R′ is a C₁₋₁₂ alkyl; l is 3; and m is 7.

[0884] In some embodiments of Formula (I) or (I-b), R′^{a} is R′^{branched}; R′^{branched} is

[chemical structure]

[symbol]

denotes a point of attachment; Rap and Ras are each H; R^{aγ} is C₂₋₁₂ alkyl; R² and R³ are each C₁₋₁₄ alkyl; R⁴ is —(CH₂)ₙOH; n is 2; each R⁵ is H; each R⁶ is H; M and M′ are each —C(O)O—; R′ is a C₁₋₁₂ alkyl; 1 is 5; and m is 7.

[0885] In some aspects, the disclosure relates to a compound of Formula (I-c):

[chemical structure]

or its N-oxide, or a salt or isomer thereof,
[0886] wherein R′^{a} is R′^{branched}; wherein
   [0887] R′^{branched} is

[chemical structure]

[symbol]

wherein denotes a point of attachment;
[0888] wherein R^{aΔ}, R^{aβ}, R^{aγ}, and R^{aδ} are each independently selected from the group consisting of H, C₂₋₁₂ alkyl, and C₂₋₁₂ alkenyl;
[0889] R² and R³ are each independently selected from the group consisting of C₁₋₁₄ alkyl and C₂₋₁₄ alkenyl;
[0890] R⁴ is

[chemical structure]

[0891] wherein [symbol] denotes a point of attachment; wherein
[0892] R¹⁰ is N(R)₂; each R is independently selected from the group consisting of C₁₋₆ alkyl, C₂₋₃ alkenyl, and H; n2 is selected from the group consisting of 1, 2, 3, 4, 5, 6, 7, 8, 9, and 10;
[0893] each R⁵ is independently selected from the group consisting of C₁₋₃ alkyl, C₂₋₃ alkenyl, and H;
[0894] each R⁶ is independently selected from the group consisting of C₁₋₃ alkyl, C₂₋₃ alkenyl, and H;
[0895] M and M′ are each independently selected from the group consisting of —C(O)O— and —OC(O)—;
[0896] R′ is a C₁₋₁₂ alkyl or C₂₋₁₂ alkenyl;
[0897] l is selected from the group consisting of 1, 2, 3, 4, and 5; and
[0898] m is selected from the group consisting of 5, 6, 7, 8, 9, 10, 11, 12, and 13.

[0899] In some embodiments, R′^{a} is R′^{branched}; R′^{branched} is

[chemical structure]

[symbol]

denotes a point of attachment; R^{aβ}, R^{aγ}, and R^{aδ} are each H; R^{a} is C₂₋₁₂ alkyl; R² and R³ are each C₁₋₁₄ alkyl; R⁴ is

[chemical structure]

[symbol]

denotes a point of attachment; R¹⁰ is NH(C₁₋₆ alkyl); n2 is 2; each R⁵ is H; each R⁶ is H; M and M′ are each —C(O)O—; R′ is a C₁₋₁₂ alkyl; 1 is 5; and m is 7.

[0900] In some embodiments, the compound of Formula (I-c) is:

[chemical structure]

[0901] In some aspects the disclosure relates to a compound of Formula (II):

[chemical structure]

or its N-oxide, or a salt or isomer thereof,
[0902] wherein R′^{a} is R′^{branched} or R′^{cyclic}; wherein
[0903] R′^{branched} is:

[chemical structure]

and R′^{cyclic} is:

[chemical structure]

and
[0904] R′^{b} is

[chemical structure]

[0905] wherein [symbol] denotes a point of attachment;
[0906] R^{aγ} and R^{aδ} are each independently selected from the group consisting of H, C₁₋₁₂ alkyl, and C₂₋₁₂ alkenyl, wherein at least one of R^{aγ} and R^{aδ} is selected from the group consisting of C₁₋₁₂ alkyl and C₂₋₁₂ alkenyl;
[0907] R^{bγ} and R^{bγ} are each independently selected from the group consisting of H, C₁₋₁₂ alkyl, and C₂₋₁₂ alkenyl, wherein at least one of R^{bγ} and R^{bδ} is selected from the group consisting of C₁₋₁₂ alkyl and C₂₋₁₂ alkenyl;
[0908] R² and R³ are each independently selected from the group consisting of C₁₋₁₄ alkyl and C₂₋₁₄ alkenyl;
[0909] R⁴ is selected from the group consisting of —(CH₂)ₙOH wherein n is selected from the group consisting of 12, 3, 4, and 5, and

[chemical structure]

[0910] wherein [symbol] denotes a point of attachment; wherein
[0911] R¹⁰ is N(R)₂; each R is independently selected from the group consisting of C₁₋₆ alkyl, C₂₋₃ alkenyl, and H; and n2 is selected from the group consisting of 1, 2, 3, 4, 5, 6, 7, 8, 9, and 10; each R′ independently is a C₁₋₁₂ alkyl or C₂₋₁₂ alkenyl;
[0912] Y^{a} is a C₃₋₆ carbocycle;
[0913] R*″^{a} is selected from the group consisting of C₁₋₁₅ alkyl and C₂₋₁₅ alkenyl; and
[0914] s is 2 or 3;
[0915] m is selected from 1, 2, 3, 4, 5, 6, 7, 8, and 9;
[0916] l is selected from 1, 2, 3, 4, 5, 6, 7, 8, and 9.

[0917] In some aspects, the disclosure relates to a compound of Formula (II-a):

[chemical structure]

or its N-oxide, or a salt or isomer thereof,
[0918] wherein R′^{a} is R′^{branched} or R′^{cyclic}; wherein
[0919] R′^{branched} is

[chemical structure]

and R′^{b} is

[chemical structure]

[0920] wherein [symbol] denotes a point of attachment;
[0921] R^{aγ} and R^{aδ} are each independently selected from the group consisting of H, C₁₋₁₂ alkyl, and C₂₋₁₂ alkenyl, wherein at least one of R^{aγ} and R^{aδ} is selected from the group consisting of C₁₋₁₂ alkyl and C₂₋₁₂ alkenyl;
[0922] R^{bγ} and R^{bδ} are each independently selected from the group consisting of H, C₁₋₁₂ alkyl, and C₂₋₁₂ alkenyl, wherein at least one of R^{bγ} and R^{bδ} is selected from the group consisting of C₁₋₁₂ alkyl and C₂₋₁₂ alkenyl;
[0923] R² and R³ are each independently selected from the group consisting of C₁₋₁₄ alkyl and C₂₋₁₄ alkenyl;
[0924] R⁴ is selected from the group consisting of —(CH₂)ₙOH wherein n is selected from the group consisting of 1, 2, 3, 4, and 5, and

[chemical structure]

[0925] wherein [symbol] denotes a point of attachment; wherein
[0926] R¹⁰ is N(R)₂; each R is independently selected from the group consisting of C₁₋₆ alkyl, C₂₋₃ alkenyl, and H; and n2 is selected from the group consisting of 1, 2, 3, 4, 5, 6, 7, 8, 9, and 10; each R′ independently is a C₁₋₁₂ alkyl or C₂₋₁₂ alkenyl;
[0927] m is selected from 1, 2, 3, 4, 5, 6, 7, 8, and 9;
[0928] l is selected from 1, 2, 3, 4, 5, 6, 7, 8, and 9.

[0929] In some aspects, the disclosure relates to a compound of Formula (II-b):

[chemical structure]

or its N-oxide, or a salt or isomer thereof,
[0930] wherein R′^{a} is R′^{branched} or R′^{cyclic}; wherein
[0931] R′^{branched} is

[chemical structure]

and R′^{b} is:

[chemical structure]

[0932] wherein [symbol] denotes a point of attachment;
[0933] R^{aγ} and R^{bγ} are each independently selected from the group consisting of C₁₋₁₂ alkyl and C₂₋₁₂ alkenyl;
[0934] R² and R³ are each independently selected from the group consisting of C₁₋₁₄ alkyl and C₂₋₁₄ alkenyl;
[0935] R⁴ is selected from the group consisting of —(CH₂)ₙOH wherein n is selected from the group
[0936] consisting of 1, 2, 3, 4, and 5, and

[chemical structure]

[0937] wherein [symbol] denotes a point of attachment; wherein
[0938] R¹⁰ is N(R)₂; each R is independently selected from the group consisting of C₁₋₆ alkyl, C₂₋₃ alkenyl, and H; and n2 is selected from the group consisting of 1, 2, 3, 4, 5, 6, 7, 8, 9, and 10;
[0939] each R′ independently is a C₁₋₁₂ alkyl or C₂₋₁₂ alkenyl;
[0940] m is selected from 1, 2, 3, 4, 5, 6, 7, 8, and 9;
[0941] l is selected from 1, 2, 3, 4, 5, 6, 7, 8, and 9.

[0942] In some aspects, the disclosure relates to a compound of Formula (II-c):

[chemical structure]

or its N-oxide, or a salt or isomer thereof,
[0943] wherein R′^{a} is R′^{branched} or R′^{cyclic}; wherein
[0944] R′^{branched} is:

[chemical structure]

and R′^{b} is:

[chemical structure]

[0945] wherein [symbol] denotes a point of attachment;
[0946] wherein R^{aγ} is selected from the group consisting of C₁₋₁₂ alkyl and C₂₋₁₂ alkenyl;
[0947] R² and R³ are each independently selected from the group consisting of C₁₋₁₄ alkyl and C₂₋₁₄ alkenyl;
[0948] R⁴ is selected from the group consisting of —(CH₂)ₙOH wherein n is selected from the group
[0949] consisting of 1, 2, 3, 4, and 5, and

[chemical structure]

[0950] wherein [symbol] denotes a point of attachment; wherein
[0951] R¹⁰ is N(R)₂; each R is independently selected from the group consisting of C₁₋₆ alkyl, C₂₋₃ alkenyl, and H; and n2 is selected from the group consisting of 1, 2, 3, 4, 5, 6, 7, 8, 9, and 10;
[0952] R′ is a C₁₋₁₂ alkyl or C₂₋₁₂ alkenyl;
[0953] m is selected from 1, 2, 3, 4, 5, 6, 7, 8, and 9;
[0954] l is selected from 1, 2, 3, 4, 5, 6, 7, 8, and 9.

[0955] In some aspects, the disclosure relates to a compound of Formula (II-d):

[chemical structure]

or its N-oxide, or a salt or isomer thereof,
[0956] wherein R′^{a} is R′^{branched} or R′^{cyclic}; wherein
[0957] R′^{branched} is:

[chemical structure]

and R′^{b} is:

[chemical structure]

[0958] wherein [symbol] denotes a point of attachment;
[0959] wherein R^{aγ} and R^{bγ} are each independently selected from the group consisting of C₁₋₁₂ alkyl and C₂₋₁₂ alkenyl;
[0960] R⁴ is selected from the group consisting of —(CH₂)ₙOH wherein n is selected from the group consisting of 1, 2, 3, 4, and 5, and

[chemical structure]

[0961] wherein [symbol] denotes a point of attachment; wherein
[0962] R¹⁰ is N(R)₂; each R is independently selected from the group consisting of C₁₋₆ alkyl, C₂₋₃ alkenyl, and H; and n2 is selected from the group consisting of 1, 2, 3, 4, 5, 6, 7, 8, 9, and 10; each R′ independently is a C₁₋₁₂ alkyl or C₂₋₁₂ alkenyl;
[0963] m is selected from 1, 2, 3, 4, 5, 6, 7, 8, and 9;
[0964] l is selected from 1, 2, 3, 4, 5, 6, 7, 8, and 9.

[0965] In some aspects, the disclosure relates to a compound of Formula (II-e):

[chemical structure]

or its N-oxide, or a salt or isomer thereof,
[0966] wherein R′^{a} is R′^{branched} or R′^{cyclic}; wherein
[0967] R′^{branched} is

[chemical structure]

and R′^{b} is:

[chemical structure]

[0968] wherein [symbol] denotes a point of attachment;
[0969] wherein R^{aγ} is selected from the group consisting of C₁₋₁₂ alkyl and C₂₋₁₂ alkenyl;
[0970] R² and R³ are each independently selected from the group consisting of C₁₋₁₄ alkyl and C₂₋₁₄ alkenyl;
[0971] R⁴ is —(CH₂)ₙOH wherein n is selected from the group consisting of 1, 2, 3, 4, and 5;
[0972] R′ is a C₁₋₁₂ alkyl or C₂₋₁₂ alkenyl;
[0973] m is selected from 1, 2, 3, 4, 5, 6, 7, 8, and 9;
[0974] l is selected from 1, 2, 3, 4, 5, 6, 7, 8, and 9.

[0975] In some embodiments of the compound of Formula (II), (II-a), (II-b), (II-c), (II-d), or (II-e), m and l are each independently selected from 4, 5, and 6. In some embodiments of the compound of Formula (II), (II-a), (II-b), (II-c), (II-d), or (II-e), m and l are each 5.

[0976] In some embodiments of the compound of Formula (II), (II-a), (II-b), (II-c), (II-d), or (II-e), each R′ independently is a C₁₋₁₂ alkyl. In some embodiments of the compound of Formula (II), (II-a), (II-b), (II-c), (II-d), or (II-e), each R′ independently is a C₂₋₅ alkyl.

[0977] In some embodiments of the compound of Formula (II), (II-a), (II-b), (II-c), (II-d), or (II-e), R′^{b} is:

[chemical structure]

and R² and R³ are each independently a C₁₋₁₄ alkyl. In some embodiments of the compound of Formula (II), (II-a), (II-b), (II-c), (II-d), or (II-e), R′^{b} is:

[chemical structure]

and R² and R³ are each independently a C₆₋₁₀ alkyl. In some embodiments of the compound of Formula (II), (II-a), (II-b), (II-c), (II-d), or (II-e), R′^{b} is:

[chemical structure]

and R² and R³ are each a C₈ alkyl.

[0978] In some embodiments of the compound of Formula (II), (II-a), (II-b), (II-c), (II-d), or (II-e), R′^{branched} is:

[chemical structure]

### and R′^{b} is:

[chemical structure]

R^{aγ} is a C₁₋₁₂ alkyl and R² and R³ are each independently a C₆₋₁₀ alkyl. In some embodiments of the compound of Formula (II), (II-a), (II-b), (II-c), (II-d), or (II-e), R′^{branched} is:

[chemical structure]

### and R′^{b} is:

[chemical structure]

R^{aγ} is a C₂₋₆ alkyl and R² and R³ are each independently a C₆₋₁₀ alkyl. In some embodiments of the compound of Formula (II), (II-a), (II-b), (II-c), (II-d), or (II-e), R′^{branched} is:

[chemical structure]

### and R′^{b} is:

[chemical structure]

R^{aγ} is a C₂₋₆ alkyl, and R² and R³ are each a C₈ alkyl.

[0979] In some embodiments of the compound of Formula (II), (II-a), (II-b), (II-c), (II-d), or (II-e), R′^{branched} is:

[chemical structure]

### R′^{b} is:

[chemical structure]

and R^{aγ} and R^{bγ} are each a C₁₋₁₂ alkyl.

[0980] In some embodiments of the compound of Formula (II), (II-a), (II-b), (II-c), (II-d), or (II-e), R′^{branched} is:

[chemical structure]

### R′^{b} is:

[chemical structure]

and R^{aγ} and R^{bγ} are each a C₂₋₆ alkyl.

[0981] In some embodiments of the compound of Formula (II), (II-a), (II-b), (II-c), (II-d), or (II-e), m and l are each independently selected from 4, 5, and 6 and each R′ independently is a C₁₋₁₂ alkyl. In some embodiments of the compound of Formula (II), (II-a), (II-b), (II-c), (II-d), or (II-e), m and l are each 5 and each R′ independently is a C₂₋₅ alkyl.

[0982] In some embodiments of the compound of Formula (II), (II-a), (II-b), (II-c), (II-d), or (II-e), R′^{branched} is:

[chemical structure]

### R′^{b} is:

[chemical structure]

m and l are each independently selected from 4, 5, and 6, each R′ independently is a C₁₋₁₂ alkyl, and R^{aγ} and R^{bγ} are each a C₁₋₁₂ alkyl. In some embodiments of the compound of Formula (II), (II-a), (II-b), (II-c), (II-d), or (II-e), R′^{branched} is:

[chemical structure]

### R′^{b} is

[chemical structure]

m and l are each 5, each R′ independently is a C₂₋₅ alkyl, and R^{aγ} and R^{bγ} are each a C₂₋₆ alkyl.

[0983] In some embodiments of the compound of Formula (II), (II-a), (II-b), (II-c), (II-d), or (II-e), R′^{branched} is:

[chemical structure]

### and R′^{b} is:

[chemical structure]

m and l are each independently selected from 4, 5, and 6, R′ is a C₁₋₁₂ alkyl, R^{aγ} is a C₁₋₁₂ alkyl and R² and R³ are each independently a C₆₋₁₀ alkyl. In some embodiments of the compound of Formula (II), (II-a), (II-b), (II-c), (II-d), or (II-e), R′^{branched} is:

[chemical structure]

### and R′^{b} is:

[chemical structure]

m and l are each 5, R′ is a C₂₋₅ alkyl, R^{aγ} is a C₂₋₆ alkyl, and R² and R³ are each a C₈ alkyl.

[0984] In some embodiments of the compound of Formula (II), (II-a), (II-b), (II-c), (II-d), or (II-e), R⁴ is

[chemical structure]

wherein R¹⁰ is NH(C₁₋₆ alkyl) and n2 is 2. In some embodiments of the compound of Formula (II), (II-a), (II-b), (II-c), (II-d), or (II-e), R⁴ is

[chemical structure]

wherein R¹⁰ is NH(CH₃) and n2 is 2.

[0985] In some embodiments of the compound of Formula (II), (II-a), (II-b), (II-c), (II-d), or (II-e), R′^{branched} is:

[chemical structure]

### R′ is

[chemical structure]

m and l are each independently
selected from 4, 5, and 6, each R′ independently is a C₁₋₁₂ alkyl, R^{aγ} and R^{bγ} are each a C₁₋₁₂ alkyl, and R⁴ is

[chemical structure]

wherein R¹⁰ is NH(C₁₋₆ alkyl), and n2 is 2. In some embodiments of the compound of Formula II, (II-a), (II-b), (II-c), (II-d), or (II-e), R′^{branched} is:

[chemical structure]

### R′^{b} is:

[chemical structure]

m and l are each 5, each R′ independently is a C₂₋₅ alkyl, R^{aγ} and R^{bγ} are each a C₂₋₆ alkyl, and R⁴ is

[chemical structure]

wherein R¹⁰ is NH(CH₃) and n2 is 2.

[0986] In some embodiments of the compound of Formula (II), (II-a), (II-b), (II-c), (II-d), or (II-e), R′^{branched} is:

[chemical structure]

### and R′^{b} is:

[chemical structure]

m and l are each independently selected from 4, 5, and 6, R′ is a C₁₋₁₂ alkyl, R² and R³ are each independently a C₆₋₁₀ alkyl, R^{aγ} is a C₁₋₁₂ alkyl, and R⁴ is

[chemical structure]

wherein R¹⁰ is NH(C₁₋₆ alkyl) and n2 is 2. In some embodiments of the compound of Formula (II), (II-a), (II-b), (II-c), (II-d), or (II-e), R′^{branched} is:

[chemical structure]

### and R′^{b} is:

[chemical structure]

m and l are each 5, R′ is a C₂₋₅ alkyl, R^{aγ} is a C₂₋₆ alkyl, R² and R³ are each a C₈ alkyl, and R⁴ is

[chemical structure]

wherein R¹⁰ is NH(CH₃) and n2 is 2.

[0987] In some embodiments of the compound of Formula (II), (II-a), (II-b), (II-c), (II-d), or (II-e), R⁴ is —(CH₂)ₙOH and n is 2, 3, or 4. In some embodiments of the compound of Formula (II), (II-a), (II-b), (II-c), (II-d), or (II-e), R⁴ is —(CH₂)ₙOH and n is 2.

[0988] In some embodiments of the compound of Formula (II), (II-a), (II-b), (II-c), (II-d), or (II-e), R′^{branched} is:

[chemical structure]

### R′^{b} is:

[chemical structure]

m and l are each independently selected from 4, 5, and 6, each R′ independently is a C₁₋₁₂ alkyl, R^{aγ} and R^{bγ} are each a C₁₋₁₂ alkyl, R⁴ is —(CH₂)ₙOH, and n is 2, 3, or 4. In some embodiments of the compound of Formula (II), (II-a), (II-b), (II-c), (II-d), or (II-e), R′^{branched} is:

[chemical structure]

### R′^{b} is:

[chemical structure]

m and l are each 5, each R′ independently is a C₂₋₅ alkyl, R^{aγ} and R^{bγ} are each a C₂₋₆ alkyl, R⁴ is —(CH₂)ₙOH, and n is 2.

[0989] In some aspects, the disclosure relates to a compound of Formula (II-f):

[chemical structure]

or its N-oxide, or a salt or isomer thereof,
[0990] wherein R′^{a} is R′^{branched} or R′^{cyclic}; wherein
[0991] R′^{branched} is:

[chemical structure]

and R′^{b} is:

[chemical structure]

[0992] wherein [symbol] denotes a point of attachment;
[0993] R^{aγ} is a C₁₋₁₂ alkyl;
[0994] R² and R³ are each independently a C₁₋₁₄ alkyl;
[0995] R⁴ is —(CH₂)ₙOH wherein n is selected from the group consisting of 1, 2, 3, 4, and 5;
[0996] R′ is a C₁₋₁₂ alkyl;
[0997] m is selected from 4, 5, and 6; and
[0998] l is selected from 4, 5, and 6.

[0999] In some embodiments of the compound of Formula (II-f), m and l are each 5, and n is 2, 3, or 4.

[1000] In some embodiments of the compound of Formula (II-f) R′ is a C₂₋₅ alkyl, R^{aγ} is a C₂₋₆ alkyl, and R² and R³ are each a C₆₋₁₀ alkyl.

[1001] In some embodiments of the compound of Formula (II-f), m and l are each 5, n is 2, 3, or 4, R′ is a C₂₋₅ alkyl, R^{aγ} is a C₂₋₆ alkyl, and R² and R³ are each a C₆₋₁₀ alkyl.

[1002] In some aspects, the disclosure relates to a compound of Formula (II-g):

[chemical structure]

wherein
[1003] R^{aγ} is a C₂₋₆ alkyl;
[1004] R′ is a C₂₋₅ alkyl; and
[1005] R⁴ is selected from the group consisting of —(CH₂)ₙOH wherein n is selected from the group consisting of 3, 4, and 5, and

[chemical structure]

wherein [symbol] denotes a point of attachment, R¹⁰ is NH(C₁₋₆ alkyl), and n2 is selected from the group consisting of 1, 2, and 3.

[1006] In some aspects, the disclosure relates to a compound of Formula (II-h):

[chemical structure]

wherein
[1007] R^{aγ} and R^{bγ} are each independently a C₂₋₆ alkyl;
[1008] each R′ independently is a C₂₋₅ alkyl; and
[1009] R⁴ is selected from the group consisting of —(CH₂)ₙOH wherein n is selected from the group consisting of 3, 4, and 5, and

[chemical structure]

[1010] wherein [symbol] denotes a point of attachment, R¹⁰ is NH(C₁₋₆ alkyl), and n2 is selected from the group consisting of 1, 2, and 3.

[1011] In some embodiments of the compound of Formula (II-g) or (II-h), R⁴ is

[chemical structure]

wherein
[1012] R¹⁰ is NH(CH₃) and n2 is 2.

[1013] In some embodiments of the compound of Formula (II-g) or (II-h), R⁴ is —(CH₂)₂OH.

[1014] In some aspects, the disclosure relates to a compound having the Formula (III):

[chemical structure]

[1015] or a salt or isomer thereof, wherein
[1016] R¹, R², R³, R⁴, and R⁵ are independently selected from the group consisting of C₅₋₂₀ alkyl, C₅₋₂₀ alkenyl, —R″MR′, —R*YR″, —YR″, and —R*OR″;
[1017] each M is independently selected from the group consisting of —C(O)O—, —OC(O)—, —OC(O)O—, —C(O)N(R′)—, —N(R′)C(O)—, —C(O)—, —C(S)—, —C(S)S—, —SC(S)—, —CH(OH)—, —P(O)(OR′)O—, —S(O)₂—, an aryl group, and a heteroaryl group;
[1018] X¹, X², and X³ are independently selected from the group consisting of a bond, —CH₂—, —(CH₂)₂—, —CHR—, —CHY—, —C(O)—, —C(O)O—, —OC(O)—, —C(O)—CH₂—, —CH₂—C(O)—, —C(O)O—CH₂—, —OC(O)—CH₂—, —CH₂—C(O)O—, —CH₂—OC(O)—, —CH(OH)—, —C(S)—, and —CH(SH)—; each Y is independently a C₃₋₆ carbocycle;
[1019] each R* is independently selected from the group consisting of C₁₋₁₂ alkyl and C₂₋₁₂ alkenyl;
[1020] each R is independently selected from the group consisting of C₁₋₃ alkyl and a C₃₋₆ carbocycle;
[1021] each R′ is independently selected from the group consisting of C₁₋₁₂ alkyl, C₂₋₁₂ alkenyl, and H; and
[1022] each R″ is independently selected from the group consisting of C₃₋₁₂ alkyl and C₃₋₁₂ alkenyl, and
[1023] wherein:
[1024] i) at least one of X¹, X², and X³ is not —CH₂—; and/or
[1025] ii) at least one of R¹, R², R₃, R⁴, and R⁵ is —R″MR′.

[1026] In some embodiments, R¹, R², R³, R⁴, and R⁵ are each C₅₋₂₀ alkyl; X¹ is —CH₂—; and X² and X³ are each —C(O)—.

[1027] In some embodiments, the compound of Formula (III) is:

[chemical structure]

[1028] The central amine moiety of a lipid according to any of the Formulae herein, e.g. a compound having any of Formula (I), (I-a), (I-b), (I-c), (II), (II-a), (II-b), (II-c), (II-d), (II-e), (II-f), (II-g), (II-h), or (III) (each of these preceded by the letter I for clarity) may be protonated at a physiological pH. Thus, a lipid may have a positive or partial positive charge at physiological pH. Such lipids may be referred to as cationic or ionizable (amino)lipids. Lipids may also be zwitterionic, i.e., neutral molecules having both a positive and a negative charge.

[1029] In some embodiments, the amount the ionizable amino lipid of the invention, e.g. a compound having any of Formula (I), (I-a), (I-b), (I-c), (II), (II-a), (II-b), (II-c), (II-d), (II-e), (II-f), (II-g), (II-h), or (III) (each of these preceded by the letter I for clarity) ranges from about 1 mol % to 99 mol % in the lipid composition.

[1030] In one embodiment, the amount of the ionizable amino lipid of the invention, e.g. a compound having any of Formula (I), (I-a), (I-b), (I-c), (II), (II-a), (II-b), (II-c), (II-d), (II-e), (II-f), (II-g), (II-h), or (III) (each of these preceded by the letter I for clarity) is at least about 1, 2, 3, 4, 5, 6, 7, 8, 9, 10, 11, 12, 13, 14, 15, 16, 17, 18, 19, 20, 21, 22, 23, 24, 25, 26, 27, 28, 29, 30, 31, 32, 33, 34, 35, 36, 37, 38, 39, 40, 41, 42, 43, 44, 45, 46, 47, 48, 49, 50, 51, 52, 53, 54, 55, 56, 57, 58, 59, 60, 61, 62, 63, 64, 65, 66, 67, 68, 69, 70, 71, 72, 73, 74, 75, 76, 77, 78, 79, 80, 81, 82, 83, 84, 85, 86, 87, 88, 89, 90, 91, 92, 93, 94, 95, 96, 97, 98, or 99 mol % in the lipid composition.

[1031] In one embodiment, the amount of the ionizable amino lipid of the invention, e.g. a compound having any of Formula (I), (I-a), (I-b), (I-c), (II), (II-a), (II-b), (II-c), (II-d), (II-e), (II-f), (II-g), (II-h), or (III) (each of these preceded by the letter I for clarity) ranges from about 30 mol % to about 70 mol %, from about 35 mol % to about 65 mol %, from about 40 mol % to about 60 mol %, and from about 45 mol % to about 55 mol % in the lipid composition.

[1032] In one specific embodiment, the amount of the ionizable amino lipid of the invention, e.g. a compound having any of Formula (I), (I-a), (I-b), (I-c), (II), (II-a), (II-b), (II-c), (II-d), (II-e), (II-f), (II-g), (II-h), or (III) (each of these preceded by the letter I for clarity) is about 45 mol % in the lipid composition.

[1033] In one specific embodiment, the amount of the ionizable amino lipid of the invention, e.g. a compound having any of Formula (I), (I-a), (I-b), (I-c), (II), (II-a), (II-b), (II-c), (II-d), (II-e), (II-f), (II-g), (II-h), or (III) (each of these preceded by the letter I for clarity) is about 40 mol % in the lipid composition.

[1034] In one specific embodiment, the amount of the ionizable amino lipid of the invention, e.g. a compound having any of Formula (I), (I-a), (I-b), (I-c), (II), (II-a), (II-b), (II-c), (II-d), (II-e), (II-f), (II-g), (II-h), or (III) (each of these preceded by the letter I for clarity) is about 50 mol % in the lipid composition.

[1035] In addition to the ionizable amino lipid disclosed herein, e.g. a compound having any of Formula (I), (I-a), (I-b), (I-c), (II), (II-a), (II-b), (II-c), (II-d), (II-e), (II-f), (II-g), (II-h), or (III), (each of these preceded by the letter I for clarity) the lipid-based composition (e.g., lipid nanoparticle) disclosed herein can comprise additional components such as cholesterol and/or cholesterol analogs, non-cationic helper lipids, structural lipids, PEG-lipids, and any combination thereof.

[1036] Additional ionizable lipids of the invention can be selected from the non-limiting group consisting of 3-(didodecylamino)-N1,N1,4-tridodecyl-1-piperazineethanamine (KL10), N1-[2-(didodecylamino)ethyl]-N1,N4,N4-tridodecyl-1,4-piperazinediethanamine (KL22), 14,25-ditridecyl-15,18,21,24-tetraaza-octatriacontane (KL25), 1,2-dilinoleyloxy-N,N-dimethylaminopropane (DLin-DMA), 2,2-dilinoleyl-4-dimethylaminomethyl-[1,3]-dioxolane (DLin-K-DMA), heptatriaconta-6,9,28,31-tetraen-19-yl 4-(dimethylamino)butanoate (DLin-MC3-DMA), 2,2-dilinoleyl-4-(2-dimethylaminoethyl)-[1,3]-dioxolane (DLin-KC2-DMA), 1,2-dioleyloxy-N,N-dimethylaminopropane (DODMA), (13Z,165Z)—N,N-dimethyl-3-nonydocosa-13-16-dien-1-amine (L608), 2-({8-[(3β)-cholest-5-en-3-yloxy]octyl}oxy)-N,N-dimethyl-3-[(9Z,12Z)-octadeca-9,12-dien-1-yl oxy]propan-1-amine (Octyl-CLinDMA), (2R)-2-({8-[(3β)-cholest-5-en-3-yloxy]octyl}oxy)-N,N-dimethyl-3-[(9Z,12Z)-octadeca-9,12-die n-1-yloxy]propan-1-amine (Octyl-CLinDMA (2R)), and (2S)-2-({8-[(3β)-cholest-5-en-3-yloxy]octyl}oxy)-N,N-dimethyl-3-[(9Z,12Z)-octadeca-9,12-dien-1-yloxy]propan-1-amine (Octyl-CLinDMA (2S)). In addition to these, an ionizable amino lipid can also be a lipid including a cyclic amine group.

[1037] Ionizable lipids of the invention can also be the compounds disclosed in International Publication No. WO 2017/075531 A1, hereby incorporated by reference in its entirety.

[1038] Ionizable lipids of the invention can also be the compounds disclosed in International Publication No. WO 2015/199952 A1, hereby incorporated by reference in its entirety.

[1039] In any of the foregoing or related aspects, the ionizable lipid of the LNP of the disclosure comprises a compound included in any e.g. a compound having any of Formula (I), (I-a), (I-b), (I-c), (II), (II-a), (II-b), (II-c), (II-d), (II-e), (II-f), (II-g), (II-h), or (III) (each of these preceded by the letter I for clarity).

[1040] In any of the foregoing or related aspects, the ionizable lipid of the LNP of the disclosure comprises a compound comprising any of Compound Nos. 18, 25, 301, and 357.

[1041] In any of the foregoing or related aspects, the ionizable lipid of the LNP of the disclosure comprises at least one compound selected from the group consisting of: Compound Nos. 18, 25, 301, and 357. In another embodiment, the ionizable lipid of the LNP of the disclosure comprises a compound selected from the group consisting of: Compound Nos. 18, 25, 301, and 357. In another embodiment, the ionizable lipid of the LNP of the disclosure comprises Compound 18.

[1042] In another embodiment, the ionizable lipid of the LNP of the disclosure comprises Compound 25.

[1043] In any of the foregoing or related aspects, the synthesis of compounds of the invention, e.g. compounds comprising any of Compound Nos. 18, 25, 301, and 357, follows the synthetic descriptions in U.S. Provisional Patent Application No. 62/733,315, filed Sep. 19, 2018.

### Representative Synthetic Routes:

### Compound I-182: Heptadecan-9-yl 8-((3-((2-(methylamino)-3,4-dioxocyclobut-1-en-1-yl)amino)propyl)(8-(nonyloxy)-8-oxooctyl)amino)octanoate 3-Methoxy-4-(methylamino)cyclobut-3-ene-1,2-dione

[chemical structure]

[1044] To a solution of 3,4-dimethoxy-3-cyclobutene-1,2-dione (1 g, 7 mmol) in 100 mL diethyl ether was added a 2M methylamine solution in THF (3.8 mL, 7.6 mmol) and a precipitate formed. The mixture was stirred at room temperature for 24 hours, then filtered to collect the solid. The solid was washed with diethyl ether and air-dried, then dissolved in hot EtOAc and filtered. The filtrate was allowed to cool to room temperature, then cooled to 0° C. to afford a precipitate that was isolated via filtration, washed with cold EtOAc, air-dried, then dried under vacuum to yield 3-methoxy-4-(methylamino)cyclobut-3-ene-1,2-dione (0.70 g, 5 mmol, 73%) as a solid. ¹H NMR (300 MHz, DMSO-d₆) δ: ppm 8.50 (br. d, 1H, J=69 Hz); 4.27 (s, 3H); 3.02 (sdd, 3H, J=42 Hz, 4.5 Hz).

### Heptadecan-9-yl 8-((3-((2-(methylamino)-3,4-dioxocyclobut-1-en-1-yl)amino)propyl)(8-(nonyloxy)-8-oxooctyl)amino)octanoate

[chemical structure]

[1045] To a solution of heptadecan-9-yl 8-((3-aminopropyl)(8-(nonyloxy)-8-oxooctyl)amino)octanoate (200 mg, 0.28 mmol) in 10 mL ethanol was added 3-methoxy-4-(methylamino)cyclobut-3-ene-1,2-dione (39 mg, 0.28 mmol). The reaction mixture stirred at room temperature for 20 hours, then concentrated in vacuo to yield a residue. The residue was purified by silica gel chromatography (0-100% (mixture of 1% NH₄OH, 20% MeOH in dichloromethane) in dichloromethane) to give heptadecan-9-yl 8-((3-((2-(methylamino)-3,4-dioxocyclobut-1-en-1-yl)amino)propyl)(8-(nonyloxy)-8-oxooctyl)amino)octanoate (138 mg, 0.17 mmol, 60%) as a solid. UPLC/ELSD: RT=3. min. MS (ES): m/z (MH⁺) 833.4 for C₅₁H₉₅N₃O₆. ¹H NMR (300 MHz, CDCl₃) δ: ppm 7.86 (br. s., 1H); 4.86 (quint., 1H, J=6 Hz); 4.05 (t, 2H, J=6 Hz); 3.92 (d, 2H, J=3 Hz); 3.20 (s, 6H); 2.63 (br. s, 2H); 2.42 (br. s, 3H); 2.28 (m, 4H); 1.74 (br. s, 2H); 1.61 (m, 8H); 1.50 (m, 5H); 1.41 (m, 3H); 1.25 (br. m, 47H); 0.88 (t, 9H, J=7.5 Hz).

### Compound I-301: Heptadecan-9-yl 8-((3-((2-(methylamino)-3,4-dioxocyclobut-1-en-1-yl)amino)propyl)(8-oxo-8-(undecan-3-yloxy)octyl)amino)octanoate

[chemical structure]

[1046] Compound I-301 was prepared analogously to compound 182 except that heptadecan-9-yl 8-((3-aminopropyl)(8-oxo-8-(undecan-3-yloxy)octyl)amino)octanoate (500 mg, 0.66 mmol) was used instead of heptadecan-9-yl 8-((3-aminopropyl)(8-(nonyloxy)-8-oxooctyl)amino)octanoate. Following an aqueous workup, the residue was purified by silica gel chromatography (0-50% (mixture of 1% NH₄OH, 20% MeOH in dichloromethane) in dichloromethane) to give heptadecan-9-yl 8-((3-((2-(methylamino)-3,4-dioxocyclobut-1-en-1-yl)amino)propyl)(8-oxo-8-(undecan-3-yloxy)octyl)amino)octanoate (180 mg, 32%) as a solid. HPLC/UV (254 nm): RT=6.77 min. MS (CI): m/z (MH⁺) 860.7 for C₅₂H₉₇N₃O₆. ¹H NMR (300 MHz, CDCl₃): δ ppm 4.86-4.79 (m, 2H); 3.66 (bs, 2H); 3.25 (d, 3H, J=4.9 Hz); 2.56-2.52 (m, 2H); 2.42-2.37 (m, 4H); 2.28 (dd, 4H, J=2.7 Hz, 7.4 Hz); 1.78-1.68 (m, 3H); 1.64-1.50 (m, 16H); 1.48-1.38 (m, 6H); 1.32-1.18 (m, 43H); 0.88-0.84 (m, 12H).

### Cholesterol/Structural Lipids

[1047] The LNP described herein comprises one or more structural lipids.

[1048] As used herein, the term “structural lipid” refers to sterols and also to lipids containing sterol moieties. Incorporation of structural lipids in the lipid nanoparticle may help mitigate aggregation of other lipids in the particle. Structural lipids can include, but are not limited to, cholesterol, fecosterol, ergosterol, bassicasterol, tomatidine, tomatine, ursolic, alpha-tocopherol, and mixtures thereof. In certain embodiments, the structural lipid is cholesterol. In certain embodiments, the structural lipid includes cholesterol and a corticosteroid (such as, for example, prednisolone, dexamethasone, prednisone, and hydrocortisone), or a combination thereof.

[1049] In some embodiments, the structural lipid is a sterol. As defined herein, “sterols” are a subgroup of steroids consisting of steroid alcohols. In certain embodiments, the structural lipid is a steroid. In certain embodiments, the structural lipid is cholesterol. In certain embodiments, the structural lipid is an analog of cholesterol. In certain embodiments, the structural lipid is alpha-tocopherol. Examples of structural lipids include, but are not limited to, the following:

[chemical structure]

[1050] The target cell target cell delivery LNPs described herein comprises one or more structural lipids.

[1051] As used herein, the term “structural lipid” refers to sterols and also to lipids containing sterol moieties. Incorporation of structural lipids in the lipid nanoparticle may help mitigate aggregation of other lipids in the particle. In certain embodiments, the structural lipid includes cholesterol and a corticosteroid (such as, for example, prednisolone, dexamethasone, prednisone, and hydrocortisone), or a combination thereof.

[1052] In some embodiments, the structural lipid is a sterol. As defined herein, “sterols” are a subgroup of steroids consisting of steroid alcohols. Structural lipids can include, but are not limited to, sterols (e.g., phytosterols or zoosterols).

[1053] In certain embodiments, the structural lipid is a steroid. For example, sterols can include, but are not limited to, cholesterol, β-sitosterol, fecosterol, ergosterol, sitosterol, campesterol, stigmasterol, brassicasterol, ergosterol, tomatidine, tomatine, ursolic acid, alpha-tocopherol, or the like.

[1054] In certain embodiments, the structural lipid is cholesterol. In certain embodiments, the structural lipid is an analog of cholesterol.

### Ratio of Compounds

[1055] A lipid nanoparticle of the invention can include a structural component as described herein. The structural component of the lipid nanoparticle can be any one of compounds S-1-148, a mixture of one or more structural compounds of the invention and/or any one of compounds S-1-148 combined with a cholesterol and/or a phytosterol.

[1056] For example, the structural component of the lipid nanoparticle can be a mixture of one or more structural compounds (e.g. any of Compounds S-1-148) of the invention with cholesterol. The mol % of the structural compound present in the lipid nanoparticle relative to cholesterol can be from 0-99 mol %. The mol % of the structural compound present in the lipid nanoparticle relative to cholesterol can be about 10 mol %, 20 mol %, 30 mol %, 40 mol %, 50 mol %, 60 mol %, 70 mol %, 80 mol %, or 90 mol %.

[1057] In one aspect, the invention features a composition including two or more sterols, wherein the two or more sterols include at least two of: β-sitosterol, sitostanol, camesterol, stigmasterol, and brassicasteol. The composition may additionally comprise cholesterol. In one embodiment, β-sitosterol comprises about 35-99%, e.g., about 40%, 50%, 60%, 70%, 80%, 90%, 95% or greater of the non-cholesterol sterol in the composition.

[1058] In another aspect, the invention features a composition including two or more sterols, wherein the two or more sterols include β-sitosterol and campesterol, wherein β-sitosterol includes 95-99.9% of the sterols in the composition and campesterol includes 0.1-5% of the sterols in the composition.

[1059] In some embodiments, the composition further includes sitostanol. In some embodiments, β-sitosterol includes 95-99.9%, campesterol includes 0.05-4.95%, and sitostanol includes 0.05-4.95% of the sterols in the composition.

[1060] In another aspect, the invention features a composition including two or more sterols, wherein the two or more sterols include β-sitosterol and sitostanol, wherein β-sitosterol includes 95-99.9% of the sterols in the composition and sitostanol includes 0.1-5% of the sterols in the composition.

[1061] In some embodiments, the composition further includes campesterol. In some embodiments, β-sitosterol includes 95-99.9%, campesterol includes 0.05-4.95%, and sitostanol includes 0.05-4.95% of the sterols in the composition.

[1062] In some embodiments, the composition further includes campesterol. In some embodiments, β-sitosterol includes 75-80%, campesterol includes 5-10%, and sitostanol includes 10-15% of the sterols in the composition.

[1063] In some embodiments, the composition further includes an additional sterol. In some embodiments, β-sitosterol includes 35-45%, stigmasterol includes 20-30%, and campesterol includes 20-30%, and brassicasterol includes 1-5% of the sterols in the composition.

[1064] In another aspect, the invention features a composition including a plurality of lipid nanoparticles, wherein the plurality of lipid nanoparticles include an ionizable lipid and two or more sterols, wherein the two or more sterols include β-sitosterol, and campesterol and p-sitosterol includes 95-99.9% of the sterols in the composition and campesterol includes 0.1-5% of the sterols in the composition.

[1065] In some embodiments, the two or more sterols further includes sitostanol. In some embodiments, β-sitosterol includes 95-99.9%, campesterol includes 0.05-4.95%, and sitostanol includes 0.05-4.95% of the sterols in the composition.

[1066] In another aspect, the invention features a composition including a plurality of lipid nanoparticles, wherein the plurality of lipid nanoparticles include an ionizable lipid and two or more sterols, wherein the two or more sterols include β-sitosterol, and sitostanol and β-sitosterol includes 95-99.9% of the sterols in the composition and sitostanol includes 0.1-5% of the sterols in the composition.

[1067] In some embodiments, the two or more sterols further includes campesterol. In some embodiments, β-sitosterol includes 95-99.9%, campesterol includes 0.05-4.95%, and sitostanol includes 0.05-4.95% of the sterols in the composition.

### Non-Cationic Helper Lipids/Phospholipids

[1068] In some embodiments, the lipid-based composition (e.g., LNP) described herein comprises one or more non-cationic helper lipids. In some embodiments, the non-cationic helper lipid is a phospholipid. In some embodiments, the non-cationic helper lipid is a phospholipid substitute or replacement.

[1069] As used herein, the term “non-cationic helper lipid” refers to a lipid comprising at least one fatty acid chain of at least 8 carbons in length and at least one polar head group moiety. In one embodiment, the helper lipid is not a phosphatidyl choline (PC). In one embodiment the non-cationic helper lipid is a phospholipid or a phospholipid substitute. In some embodiments, the phospholipid or phospholipid substitute can be, for example, one or more saturated or (poly)unsaturated phospholipids, or phospholipid substitutes, or a combination thereof. In general, phospholipids comprise a phospholipid moiety and one or more fatty acid moieties.

[1070] A phospholipid moiety can be selected, for example, from the non-limiting group consisting of phosphatidyl choline, phosphatidyl ethanolamine, phosphatidyl glycerol, phosphatidyl serine, phosphatidic acid, 2-lysophosphatidyl choline, and a sphingomyelin.

[1071] A fatty acid moiety can be selected, for example, from the non-limiting group consisting of lauric acid, myristic acid, myristoleic acid, palmitic acid, palmitoleic acid, stearic acid, oleic acid, linoleic acid, alpha-linolenic acid, erucic acid, phytanoic acid, arachidic acid, arachidonic acid, eicosapentaenoic acid, behenic acid, docosapentaenoic acid, and docosahexaenoic acid.

[1072] Phospholipids include, but are not limited to, glycerophospholipids such as phosphatidylcholines, phosphatidylethanolamines, phosphatidylserines, phosphatidylinositols, phosphatidyl glycerols, and phosphatidic acids. Phospholipids also include phosphosphingolipid, such as sphingomyelin.

[1073] In some embodiments, the non-cationic helper lipid is a DSPC analog, a DSPC substitute, oleic acid, or an oleic acid analog.

[1074] In some embodiments, a non-cationic helper lipid is a non-phosphatidyl choline (PC) zwitterionic lipid, a DSPC analog, oleic acid, an oleic acid analog, or a 1,2-distearoyl-i77-glycero-3-phosphocholine (DSPC) substitute.

### Phospholipids

### Phospholipids

[1075] The lipid composition of the lipid nanoparticle composition disclosed herein can comprise one or more phospholipids, for example, one or more saturated or (poly)unsaturated phospholipids or a combination thereof. In general, phospholipids comprise a phospholipid moiety and one or more fatty acid moieties.

[1076] A phospholipid moiety can be selected, for example, from the non-limiting group consisting of phosphatidyl choline, phosphatidyl ethanolamine, phosphatidyl glycerol, phosphatidyl serine, phosphatidic acid, 2-lysophosphatidyl choline, and a sphingomyelin.

[1077] A fatty acid moiety can be selected, for example, from the non-limiting group consisting of lauric acid, myristic acid, myristoleic acid, palmitic acid, palmitoleic acid, stearic acid, oleic acid, linoleic acid, alpha-linolenic acid, erucic acid, phytanoic acid, arachidic acid, arachidonic acid, eicosapentaenoic acid, behenic acid, docosapentaenoic acid, and docosahexaenoic acid.

[1078] Particular phospholipids can facilitate fusion to a membrane. For example, a cationic phospholipid can interact with one or more negatively charged phospholipids of a membrane (e.g., a cellular or intracellular membrane). Fusion of a phospholipid to a membrane can allow one or more elements (e.g., a therapeutic agent) of a lipid-containing composition (e.g., LNPs) to pass through the membrane permitting, e.g., delivery of the one or more elements to a target tissue.

[1079] Non-natural phospholipid species including natural species with modifications and substitutions including branching, oxidation, cyclization, and alkynes are also contemplated. For example, a phospholipid can be functionalized with or cross-linked to one or more alkynes (e.g., an alkenyl group in which one or more double bonds is replaced with a triple bond). Under appropriate reaction conditions, an alkyne group can undergo a copper-catalyzed cycloaddition upon exposure to an azide. Such reactions can be useful in functionalizing a lipid bilayer of a nanoparticle composition to facilitate membrane permeation or cellular recognition or in conjugating a nanoparticle composition to a useful component such as a targeting or imaging moiety (e.g., a dye).

[1080] Phospholipids include, but are not limited to, glycerophospholipids such as phosphatidylcholines, phosphatidylethanolamines, phosphatidylserines, phosphatidylinositols, phosphatidy glycerols, and phosphatidic acids. Phospholipids also include phosphosphingolipid, such as sphingomyelin.

[1081] In some embodiments, a phospholipid of the invention comprises 1,2-distearoyl-sn-glycero-3-phosphocholine (DSPC), 1,2-dioleoyl-sn-glycero-3-phosphoethanolamine (DOPE), 1,2-dilinoleoyl-sn-glycero-3-phosphocholine (DLPC), 1,2-dimyristoyl-sn-gly cero-phosphocholine (DMPC), 1,2-dioleoyl-sn-glycero-3-phosphocholine (DOPC), 1,2-dipalmitoyl-sn-glycero-3-phosphocholine (DPPC), 1,2-diundecanoyl-sn-glycero-phosphocholine (DUPC), 1-palmitoyl-2-oleoyl-sn-glycero-3-phosphocholine (POPC), 1,2-di-O-octadecenyl-sn-glycero-3-phosphocholine (18:0 Diether PC), 1-oleoyl-2 cholesterylhemisuccinoyl-sn-glycero-3-phosphocholine (OChemsPC), 1-hexadecyl-sn-glycero-3-phosphocholine (C16 Lyso PC), 1,2-dilinolenoyl-sn-glycero-3-phosphocholine, 1,2-diarachidonoyl-sn-glycero-3-phosphocholine, 1,2-didocosahexaenoyl-sn-glycero-3-phosphocholine, 1,2-diphytanoyl-sn-glycero-3-phosphoethanolamine (ME 16.0 PE), 1,2-distearoyl-sn-glycero-3-phosphoethanolamine, 1,2-dilinoleoyl-sn-glycero-3-phosphoethanolamine, 1,2-dilinolenoyl-sn-glycero-3-phosphoethanolamine, 1,2-diarachidonoyl-sn-glycero-3-phosphoethanolamine, 1,2-didocosahexaenoyl-sn-glycero-3-phosphoethanolamine, 1,2-dioleoyl-sn-glycero-3-phospho-rac-(1-glycerol) sodium salt (DOPG), sphingomyelin, and mixtures thereof.

[1082] In certain embodiments, a phospholipid useful or potentially useful in the present invention is an analog or variant of DSPC. In certain embodiments, a phospholipid useful or potentially useful in the present invention is a compound of Formula (IV):

[chemical structure]

[1083] or a salt thereof, wherein:
   [1084] each R¹ is independently optionally substituted alkyl; or optionally two R¹ are joined together with the intervening atoms to form optionally substituted monocyclic carbocyclyl or optionally substituted monocyclic heterocyclyl; or optionally three R¹ are joined together with the intervening atoms to form optionally substituted bicyclic carbocyclyl or optionally substitute bicyclic heterocyclyl;
   [1085] n is 1, 2, 3, 4, 5, 6, 7, 8, 9, or 10;
   [1086] m is 0, 1, 2, 3, 4, 5, 6, 7, 8, 9, or 10;
   [1087] A is of the Formula:

[chemical structure]

[1088] each instance of L² is independently a bond or optionally substituted C₁₋₆ alkylene, wherein one methylene unit of the optionally substituted C₁₋₆ alkylene is optionally replaced with O, N(R^{N}), S, C(O), C(O)N(R^{N}), NR^{N}C(O), C(O)O, OC(O), OC(O)O, OC(O)N(R^{N}), NRNC(O), or NRNC(O)N(R^{N});
[1089] each instance of R² is independently optionally substituted C₁₋₃₀ alkyl, optionally substituted C₁₋₃₀ alkenyl, or optionally substituted C₁₋₃₀ alkynyl; optionally wherein one or more methylene units of R² are independently replaced with optionally substituted carbocyclylene, optionally substituted heterocyclylene, optionally substituted arylene, optionally substituted heteroarylene, N(R^{N}), O, S, C(O), C(O)N(R^{N}), NR^{N}C(O), NR^{N}C(O)N(R^{N}) C(O)O, OC(O), —OC(O)O, OC(O)N(R^{N}), NR^{N}C(O)O, C(O)S, SC(O), C(═NR^{N}), C(═NR^{N})N(R^{N}), NR^{N}C(═NR^{N}) NR^{N}C(═NR^{N})N(R^{N}), C(S), C(S)N(R^{N}), NR^{N}C(S), NR^{N}C(S)N(R^{N}) S(O), OS(O), S(O)O, —OS(O)O, OS(O)₂, S(O)₂O, OS(O)₂O, N(R^{N})S(O), S(O)N(R^{N}), N(R^{N})S(O)N(R^{N}), OS(O)N(R^{N}), N(R^{N})S(O)O, S(O)₂, N(R^{N})S(O)₂, S(O)₂N(R^{N}), N(R^{N})S(O)₂N(R^{N}), OS(O)₂N(R^{N}), or —N(R^{N})S(O)₂O;
[1090] each instance of R^{N} is independently hydrogen, optionally substituted alkyl, or a nitrogen protecting group; Ring B is optionally substituted carbocyclyl, optionally substituted heterocyclyl, optionally substituted aryl, or optionally substituted heteroaryl; and
[1091] p is 1 or 2;
[1092] provided that the compound is not of the Formula:

[chemical structure]

[1093] wherein each instance of R² is independently unsubstituted alkyl, unsubstituted alkenyl, or unsubstituted alkynyl.

[1094] In some embodiments, the phospholipids may be one or more of the phospholipids described in U.S. Application No. 62/520,530.

[1095] Phospholipid Head Modifications In certain embodiments, a phospholipid useful or potentially useful in the present invention comprises a modified phospholipid head (e.g., a modified choline group). In certain embodiments, a phospholipid with a modified head is DSPC, or analog thereof, with a modified quaternary amine. For example, in embodiments of Formula (IV), at least one of R^{t} is not methyl. In certain embodiments, at least one of R^{t} is not hydrogen or methyl. In certain embodiments, the compound of Formula (IV) is of one of the following Formulae:

[chemical structure]

[1096] or a salt thereof, wherein:
   [1097] each t is independently 1, 2, 3, 4, 5, 6, 7, 8, 9, or 10;
   [1098] each u is independently 0, 1, 2, 3, 4, 5, 6, 7, 8, 9, or 10; and
   [1099] each v is independently 1, 2, or 3.

[1100] In certain embodiments, a compound of Formula (IV) is of Formula (IV-a):

[chemical structure]

or a salt thereof.

[1101] In certain embodiments, a phospholipid useful or potentially useful in the present invention comprises a cyclic moiety in place of the glyceride moiety. In certain embodiments, a phospholipid useful in the present invention is DSPC, or analog thereof, with a cyclic moiety in place of the glyceride moiety. In certain embodiments, the compound of Formula (IV) is of Formula (IV-b):

[chemical structure]

or a salt thereof.

### Phospholipid Tail Modifications

[1102] In certain embodiments, a phospholipid useful or potentially useful in the present invention comprises a modified tail. In certain embodiments, a phospholipid useful or potentially useful in the present invention is DSPC, or analog thereof, with a modified tail. As described herein, a “modified tail” may be a tail with shorter or longer aliphatic chains, aliphatic chains with branching introduced, aliphatic chains with substituents introduced, aliphatic chains wherein one or more methylenes are replaced by cyclic or heteroatom groups, or any combination thereof. For example, in certain embodiments, the compound of (IV) is of Formula (IV-a), or a salt thereof, wherein at least one instance of R² is each instance of R² is optionally substituted C₁₋₃₀ alkyl, wherein one or more methylene units of R² are independently replaced with optionally substituted carbocyclylene, optionally substituted heterocyclylene, optionally substituted arylene, optionally substituted heteroarylene, N(R^{N}), O, S, C(O), C(O)N(R^{N}), —NR^{N}C(O), NR^{N}C(O)N(R^{N}), C(O)O, OC(O), OC(O)O, OC(O)N(R^{N}), NR^{N}C(O)O C(O)S, SC(O), C(═NR^{N}), C(═NR^{N})N(R^{N}), NRNC(═NR^{N}), NRNC(═NR^{N})N(R^{N}), C(S), C(S)N(R^{N}), NNC(S), —NR^{N}C(S)N(R^{N}), S(O), OS(O), S(O)O, OS(O)O, OS(O)₂, S(O)₂O, OS(O)₂O, N(R^{N})S(O), —S(O)N(R^{N}), N(R^{N})S(O)N(R^{N}), OS(O)N(R^{N}), N(R^{N})S(O)O, S(O)₂, N(R^{N})S(O)₂, S(O)₂N(R^{N}), —N(R^{N})S(O)₂N(R^{N}), OS(O)₂N(R^{N}), or N(R^{N})S(O)₂O.

[1103] In certain embodiments, the compound of Formula (IV) is of Formula (IV-c):

[chemical structure]

[1104] or a salt thereof, wherein:
   [1105] each x is independently an integer between 0-30, inclusive; and
   [1106] each instance is G is independently selected from the group consisting of optionally substituted carbocyclylene, optionally substituted heterocyclylene, optionally substituted arylene, optionally substituted heteroarylene, N(R^{N}), O, S, C(O), C(O)N(R^{N}), NR^{N}C(O), NR^{N}C(O)N(R^{N}) C(O)O, OC(O), OC(O)O, OC(O)N(R^{N}), NR^{N}C(O)O, C(O)S, SC(O), C(═NR^{N}), C(═NR^{N})N(R^{N}), NRNC(═NR^{N}) NRNC(═NR^{N})N(R^{N}), C(S), C(S)N(R^{N}), NRNC(S), NRNC(S)N(R^{N}) S(O) OS(O), S(O)O, OS(O)O, OS(O)₂, S(O)₂O, OS(O)₂O, N(R^{N})S(O), S(O)N(R^{N}), N(R^{N})S(O)N(R^{N}), —OS(O)N(R^{N}), N(R^{N})S(O)O, S(O)₂, N(R^{N})S(O)₂, S(O)₂N(R^{N}), N(R^{N})S(O)₂N(R^{N}), OS(O)₂N(R^{N}), or N(R^{N})S(O)₂O. Each possibility represents a separate embodiment of the present invention.

[1107] In certain embodiments, a phospholipid useful or potentially useful in the present invention comprises a modified phosphocholine moiety, wherein the alkyl chain linking the quaternary amine to the phosphoryl group is not ethylene (e.g., n is not 2). Therefore, in certain embodiments, a phospholipid useful or potentially useful in the present invention is a compound of Formula (IV), wherein n is 1, 3, 4, 5, 6, 7, 8, 9, or 10. For example, in certain embodiments, a compound of Formula (IV) is of one of the following Formulae:

[chemical structure]

or a salt thereof.

### Alternative Lipids

[1108] In certain embodiments, a phospholipid useful or potentially useful in the present invention comprises a modified phosphocholine moiety, wherein the alkyl chain linking the quaternary amine to the phosphoryl group is not ethylene (e.g., n is not 2). Therefore, in certain embodiments, a phospholipid useful.

[1109] In certain embodiments, an alternative lipid is used in place of a phospholipid of the present disclosure.

[1110] In certain embodiments, an alternative lipid of the invention is oleic acid.

[1111] In certain embodiments, the alternative lipid is one of the following:

[chemical structure]

### PEG Lipids

[1112] The lipid composition of a pharmaceutical composition disclosed herein can comprise one or more a polyethylene glycol (PEG) lipid.

[1113] As used herein, the term “PEG-lipid” refers to polyethylene glycol (PEG)-modified lipids. Non-limiting examples of PEG-lipids include PEG-modified phosphatidylethanolamine and phosphatidic acid, PEG-ceramide conjugates (e.g., PEG-CerC14 or PEG-CerC20), PEG-modified dialkylamines and PEG-modified 1,2-diacyloxypropan-3-amines. Such lipids are also referred to as PEGylated lipids. For example, a PEG lipid can be PEG-c-DOMG, PEG-DMG, PEG-DLPE, PEG-DMPE, PEG-DPPC, or a PEG-DSPE lipid.

[1114] In some embodiments, the PEG-lipid includes, but not limited to 1,2-dimyristoyl-sn-glycerol methoxypolyethylene glycol (PEG-DMG), 1,2-distearoyl-sn-glycero-3-phosphoethanolamine-N-[amino(polyethylene glycol)] (PEG-DSPE), PEG-disteryl glycerol (PEG-DSG), PEG-dipalmetoleyl, PEG-dioleyl, PEG-distearyl, PEG-diacylglycamide (PEG-DAG), PEG-dipalmitoyl phosphatidylethanolamine (PEG-DPPE), or PEG-1,2-dimyristyloxlpropyl-3-amine (PEG-c-DMA).

[1115] In one embodiment, the PEG-lipid is selected from the group consisting of a PEG-modified phosphatidylethanolamine, a PEG-modified phosphatidic acid, a PEG-modified ceramide, a PEG-modified dialkylamine, a PEG-modified diacylglycerol, a PEG-modified dialkylglycerol, and mixtures thereof.

[1116] In some embodiments, the lipid moiety of the PEG-lipids includes those having lengths of from about C₁₄ to about C₂₂, preferably from about C₁₄ to about C₁₆. In some embodiments, a PEG moiety, for example an mPEG-NH₂, has a size of about 1000, 2000, 5000, 10,000, 15,000 or 20,000 daltons. In one embodiment, the PEG-lipid is PEG₂ₖ-DMG.

[1117] In one embodiment, the lipid nanoparticles described herein can comprise a PEG lipid which is a non-diffusible PEG. Non-limiting examples of non-diffusible PEGs include PEG-DSG and PEG-DSPE.

[1118] PEG-lipids are known in the art, such as those described in U.S. Pat. No. 8,158,601 and International Publ. No. WO 2015/130584 A2, which are incorporated herein by reference in their entirety.

[1119] In general, some of the other lipid components (e.g., PEG lipids) of various Formulae, described herein may be synthesized as described International Patent Application No. PCT/US2016/000129, filed Dec. 10, 2016, entitled “Compositions and Methods for Delivery of Therapeutic Agents,” which is incorporated by reference in its entirety.

[1120] The lipid component of a lipid nanoparticle composition may include one or more molecules comprising polyethylene glycol, such as PEG or PEG-modified lipids. Such species may be alternately referred to as PEGylated lipids. A PEG lipid is a lipid modified with polyethylene glycol. A PEG lipid may be selected from the non-limiting group including PEG-modified phosphatidylethanolamines, PEG-modified phosphatidic acids, PEG-modified ceramides, PEG-modified dialkylamines, PEG-modified diacylglycerols, PEG-modified dialkylglycerols, and mixtures thereof. For example, a PEG lipid may be PEG-c-DOMG, PEG-DMG, PEG-DLPE, PEG-DMPE, PEG-DPPC, or a PEG-DSPE lipid.

[1121] In some embodiments the PEG-modified lipids are a modified form of PEG DMG. PEG-DMG has the following structure:

[chemical structure]

[1122] In one embodiment, PEG lipids useful in the present invention can be PEGylated lipids described in International Publication No. WO2012099755, the contents of which is herein incorporated by reference in its entirety. Any of these exemplary PEG lipids described herein may be modified to comprise a hydroxyl group on the PEG chain. In certain embodiments, the PEG lipid is a PEG-OH lipid. As generally defined herein, a “PEG-OH lipid” (also referred to herein as “hydroxy-PEGylated lipid”) is a PEGylated lipid having one or more hydroxyl (—OH) groups on the lipid. In certain embodiments, the PEG-OH lipid includes one or more hydroxyl groups on the PEG chain. In certain embodiments, a PEG-OH or hydroxy-PEGylated lipid comprises an —OH group at the terminus of the PEG chain. Each possibility represents a separate embodiment of the present invention.

[1123] In certain embodiments, a PEG lipid useful in the present invention is a compound of Formula (V). Provided herein are compounds of Formula (V):

[chemical structure]

[1124] or salts thereof, wherein:
   [1125] R³ is —OR^{O};
   [1126] R^{O} is hydrogen, optionally substituted alkyl, or an oxygen protecting group;
   [1127] r is an integer between 1 and 100, inclusive;
   [1128] L¹ is optionally substituted C₁₋₁₀ alkylene, wherein at least one methylene of the optionally substituted C₁₋₁₀ alkylene is independently replaced with optionally substituted carbocyclylene, optionally substituted heterocyclylene, optionally substituted arylene, optionally substituted heteroarylene, O, N(R^{N}), S, C(O), C(O)N(R^{N}), NRNC(O) C(O)O, OC(O), OC(O)O, OC(O)N(R^{N}), NR^{N}C(O)O, or NR^{N}C(O)N(R^{N});
   [1129] D is a moiety obtained by click chemistry or a moiety cleavable under physiological conditions;
   [1130] m is 0, 1, 2, 3, 4, 5, 6, 7, 8, 9, or 10;
   [1131] A is of the Formula:

[chemical structure]

[1132] each instance of L² is independently a bond or optionally substituted C₁₋₆ alkylene, wherein one methylene unit of the optionally substituted C₁₋₆ alkylene is optionally replaced with O, N(R^{N}), S, C(O), C(O)N(R^{N}), NR^{N}C(O), C(O)O, OC(O), OC(O)O, OC(O)N(R^{N}), NRNC(O)O or NRNC(O)N(R^{N});
[1133] each instance of R² is independently optionally substituted C₁₋₃₀ alkyl, optionally substituted C₁₋₃₀ alkenyl, or optionally substituted C₁₋₃₀ alkynyl; optionally wherein one or more methylene units of R² are independently replaced with optionally substituted carbocyclylene, optionally substituted heterocyclylene, optionally substituted arylene, optionally substituted heteroarylene, N(R^{N}), O, S, C(O), C(O)N(R^{N}), NR^{N}C(O), NR^{N}C(O)N(R^{N}) C(O)O, OC(O), —OC(O)O, OC(O)N(R^{N}), NR^{N}C(O)O, C(O)S, SC(O), C(═NR^{N}), C(═NR^{N})N(R^{N}), NR^{N}C(═NR^{N}) NR^{N}C(═NR^{N})N(R^{N}), C(S), C(S)N(R^{N}), NR^{N}C(S), NR^{N}C(S)N(R^{N}) S(O), OS(O), S(O)O, —OS(O)O, OS(O)₂, S(O)₂O, OS(O)₂O, N(R^{N})S(O), S(O)N(R^{N}), N(R^{N})S(O)N(R^{N}), OS(O)N(R^{N}), N(R^{N})S(O)O, S(O)₂, N(R^{N})S(O)₂, S(O)₂N(R^{N}), N(R^{N})S(O)₂N(R^{N}), OS(O)₂N(R^{N}), or —N(R^{N})S(O)₂O;
[1134] each instance of R^{N} is independently hydrogen, optionally substituted alkyl, or a nitrogen protecting group;
[1135] Ring B is optionally substituted carbocyclyl, optionally substituted heterocyclyl, optionally substituted aryl, or optionally substituted heteroaryl; and
[1136] p is 1 or 2.

[1137] In certain embodiments, the compound of Formula (V) is a PEG-OH lipid (i.e., R³ is —OR^{O}, and R^{O} is hydrogen). In certain embodiments, the compound of Formula (V) is of Formula (V-OH):

[chemical structure]

or a salt thereof.

[1138] In certain embodiments, a PEG lipid useful in the present invention is a PEGylated fatty acid. In certain embodiments, a PEG lipid useful in the present invention is a compound of Formula (VI). Provided herein are compounds of Formula (VI):

[chemical structure]

[1139] or a salts thereof, wherein:
   [1140] R³ is —OR^{O};
   [1141] R^{O} is hydrogen, optionally substituted alkyl or an oxygen protecting group;
   [1142] r is an integer between 1 and 100, inclusive;
   [1143] R⁵ is optionally substituted C₁₀₋₄₀ alkyl, optionally substituted C₁₀₋₄₀ alkenyl, or optionally substituted C₁₀₋₄₀ alkynyl; and optionally one or more methylene groups of R⁵ are replaced with optionally substituted carbocyclylene, optionally substituted heterocyclylene, optionally substituted arylene, optionally substituted heteroarylene, N(R^{N}), O, S, C(O), C(O)N(R^{N}), —NR^{N}C(O), NR^{N}C(O)N(R^{N}), C(O)O, OC(O), OC(O)O, OC(O)N(R^{N}), NR^{N}C(O)O C(O)S, SC(O), C(═NR^{N}), C(═NR^{N})N(R^{N}), NRNC(═NR^{N}), NRNC(═NR^{N})N(R^{N}), C(S), C(S)N(R^{N}), NNC(S), —NR^{N}C(S)N(R^{N}), S(O), OS(O), S(O)O, OS(O)O, OS(O)₂, S(O)₂O, OS(O)₂O, N(R^{N})S(O), —S(O)N(R^{N}), N(R^{N})S(O)N(R^{N}), OS(O)N(R^{N}), N(R^{N})S(O)O, S(O)₂, N(R^{N})S(O)₂, S(O)₂N(R^{N}), —N(R^{N})S(O)₂N(R^{N}), OS(O)₂N(R^{N}), or N(R^{N})S(O)₂O; and
   [1144] each instance of R^{N} is independently hydrogen, optionally substituted alkyl, or a nitrogen protecting group.

[1145] In certain embodiments, the compound of Formula (VI) is of Formula (VI-OH):

[chemical structure]

[1146] or a salt thereof. In some embodiments, r is 45. In another of the foregoing or related aspects, a PEG lipid of the invention is featured wherein r is 40-50.

[1147] In yet other embodiments the compound of Formula (VI) is:

[chemical structure]

or a salt thereof.

[1148] In one embodiment, the compound of Formula (VI) is

[chemical structure]

[1149] In some aspects, the lipid composition of the pharmaceutical compositions disclosed herein does not comprise a PEG-lipid.

[1150] In some embodiments, the PEG-lipids may be one or more of the PEG lipids described in U.S. Application No. 62/520,530.

[1151] In some embodiments, a PEG lipid of the invention comprises a PEG-modified phosphatidylethanolamine, a PEG-modified phosphatidic acid, a PEG-modified ceramide, a PEG-modified dialkylamine, a PEG-modified diacylglycerol, a PEG-modified dialkylglycerol, and mixtures thereof. In some embodiments, the PEG-modified lipid is PEG-DMG, PEG-c-DOMG (also referred to as PEG-DOMG), PEG-DSG and/or PEG-DPG.

[1152] The LNPs provided herein, in certain embodiments, exhibit increased PEG shedding compared to existing LNP formulations comprising PEG lipids. “PEG shedding,” as used herein, refers to the cleavage of a PEG group from a PEG lipid. In many instances, cleavage of a PEG group from a PEG lipid occurs through serum-driven esterase-cleavage or hydrolysis. The PEG lipids provided herein, in certain embodiments, have been designed to control the rate of PEG shedding. In certain embodiments, an LNP provided herein exhibits greater than 5%, 10%, 15%, 20%, 25%, 30%, 35%, 40%, 45%, 50%, 55%, 60%, 65%, 70%, 75%, 80%, 85%, 90%, 95%, or 98% PEG shedding after about 6 hours in human serum In certain embodiments, an LNP provided herein exhibits greater than 50% PEG shedding after about 6 hours in human serum. In certain embodiments, an LNP provided herein exhibits greater than 60% PEG shedding after about 6 hours in human serum. In certain embodiments, an LNP provided herein exhibits greater than 70% PEG shedding after about 6 hours in human serum. In certain embodiments, the LNP exhibits greater than 80% PEG shedding after about 6 hours in human serum. In certain embodiments, the LNP exhibits greater than 90% PEG shedding after about 6 hours in human serum. In certain embodiments, an LNP provided herein exhibits greater than 90% PEG shedding after about 6 hours in human serum.

[1153] In other embodiments, an LNP provided herein exhibits less than 5%, 10%, 15%, 20%, 25%, 30%, 35%, 40%, 45%, 50%, 55%, 60%, 65%, 70%, 75%, 80%, 85%, 90%, 95%, or 98% PEG shedding after about 6 hours in human serum In certain embodiments, an LNP provided herein exhibits less than 60% PEG shedding after about 6 hours in human serum. In certain embodiments, an LNP provided herein exhibits less than 70% PEG shedding after about 6 hours in human serum. In certain embodiments, an LNP provided herein exhibits less than 80% PEG shedding after about 6 hours in human serum.

[1154] In addition to the PEG lipids provided herein, the LNP may comprise one or more additional lipid components. In certain embodiments, the PEG lipids are present in the LNP in a molar ratio of 0.15-15% with respect to other lipids. In certain embodiments, the PEG lipids are present in a molar ratio of 0.15-5% with respect to other lipids. In certain embodiments, the PEG lipids are present in a molar ratio of 1-5% with respect to other lipids. In certain embodiments, the PEG lipids are present in a molar ratio of 0.15-2% with respect to other lipids. In certain embodiments, the PEG lipids are present in a molar ratio of 1-2% with respect to other lipids. In certain embodiments, the PEG lipids are present in a molar ratio of approximately 1%, 1.1%, 1.2%, 1.3%, 1.4%, 1.5%, 1.6%, 1.7%, 1.8%, 1.9%, or 2% with respect to other lipids. In certain embodiments, the PEG lipids are present in a molar ratio of approximately 1.5% with respect to other lipids.

[1155] In one embodiment, the amount of PEG-lipid in the lipid composition of a pharmaceutical composition disclosed herein ranges from about 0.1 mol % to about 5 mol %, from about 0.5 mol % to about 5 mol %, from about 1 mol % to about 5 mol %, from about 1.5 mol % to about 5 mol %, from about 2 mol % to about 5 mol %, from about 0.1 mol % to about 4 mol %, from about 0.5 mol % to about 4 mol %, from about 1 mol % to about 4 mol %, from about 1.5 mol % to about 4 mol %, from about 2 mol % to about 4 mol %, from about 0.1 mol % to about 3 mol %, from about 0.5 mol % to about 3 mol %, from about 1 mol % to about 3 mol %, from about 1.5 mol % to about 3 mol %, from about 2 mol % to about 3 mol %, from about 0.1 mol % to about 2 mol %, from about 0.5 mol % to about 2 mol %, from about 1 mol % to about 2 mol %, from about 1.5 mol % to about 2 mol %, from about 0.1 mol % to about 1.5 mol %, from about 0.5 mol % to about 1.5 mol %, or from about 1 mol % to about 1.5 mol %.

[1156] In one embodiment, the amount of PEG-lipid in the lipid composition disclosed herein is about 2 mol %. In one embodiment, the amount of PEG-lipid in the lipid composition disclosed herein is about 1.5 mol %.

[1157] In one embodiment, the amount of PEG-lipid in the lipid composition disclosed herein is at least about 0.1, 0.2, 0.3, 0.4, 0.5, 0.6, 0.7, 0.8, 0.9, 1, 1.1, 1.2, 1.3, 1.4, 1.5, 1.6, 1.7, 1.8, 1.9, 2, 2.1, 2.2, 2.3, 2.4, 2.5, 2.6, 2.7, 2.8, 2.9, 3, 3.1, 3.2, 3.3, 3.4, 3.5, 3.6, 3.7, 3.8, 3.9, 4, 4.1, 4.2, 4.3, 4.4, 4.5, 4.6, 4.7, 4.8, 4.9, or 5 mol %.

### Exemplary Synthesis:

### Compound: HO-PEG₂₀₀₀-ester-C18

[chemical structure]

[1158] To a nitrogen filled flask containing palladium on carbon (10 wt. %, 74 mg, 0.070 mmol) was added Benzyl-PEG₂₀₀₀-ester-C18 (822 mg, 0.35 mmol) and MeOH (20 mL). The flask was evacuated and backfilled with H2 three times, and allowed to stir at RT and 1 atm H2 for 12 hours. The mixture was filtered through celite, rinsing with DCM, and the filtrate was concentrated in vacuo to provide the desired product (692 mg, 88%). Using this methodology n=40-50. In one embodiment, n of the resulting polydispersed mixture is referred to by the average, 45.

[1159] For example, the value of r can be determined on the basis of a molecular weight of the PEG moiety within the PEG lipid. For example, a molecular weight of 2,000 (e.g., PEG2000) corresponds to a value of n of approximately 45. For a given composition, the value for n can connote a distribution of values within an art-accepted range, since polymers are often found as a distribution of different polymer chain lengths. For example, a skilled artisan understanding the polydispersity of such polymeric compositions would appreciate that an n value of 45 (e.g., in a structural formula) can represent a distribution of values between 40-50 in an actual PEG-containing composition, e.g., a DMG PEG200 peg lipid composition.

[1160] In some aspects, a target cell delivery lipid of the pharmaceutical compositions disclosed herein does not comprise a PEG-lipid.

[1161] In one embodiment, a target cell target cell delivery LNP of the disclosure comprises a PEG-lipid. In one embodiment, the PEG lipid is not PEG DMG. In some aspects, the PEG-lipid is selected from the group consisting of a PEG-modified phosphatidylethanolamine, a PEG-modified phosphatidic acid, a PEG-modified ceramide, a PEG-modified dialkylamine, a PEG-modified diacylglycerol, a PEG-modified dialkylglycerol, and mixtures thereof. In some aspects, the PEG lipid is selected from the group consisting of PEG-c-DOMG, PEG-DMG, PEG-DLPE, PEG-DMPE, PEG-DPPC and PEG-DSPE lipid. In other aspects, the PEG-lipid is PEG-DMG.

[1162] In one embodiment, a target cell target cell delivery LNP of the disclosure comprises a PEG-lipid which has a chain length longer than about 14 or than about 10, if branched.

[1163] As used herein, the term “alkyl”, “alkyl group”, or “alkylene” means a linear or branched, saturated hydrocarbon including one or more carbon atoms (e.g., one, two, three, four, five, six, seven, eight, nine, ten, eleven, twelve, thirteen, fourteen, fifteen, sixteen, seventeen, eighteen, nineteen, twenty, or more carbon atoms), which is optionally substituted. The notation “C₁₋₁₄ alkyl” means an optionally substituted linear or branched, saturated hydrocarbon including 1-14 carbon atoms. Unless otherwise specified, an alkyl group described herein refers to both unsubstituted and substituted alkyl groups.

[1164] As used herein, the term “alkenyl”, “alkenyl group”, or “alkenylene” means a linear or branched hydrocarbon including two or more carbon atoms (e.g., two, three, four, five, six, seven, eight, nine, ten, eleven, twelve, thirteen, fourteen, fifteen, sixteen, seventeen, eighteen, nineteen, twenty, or more carbon atoms) and at least one double bond, which is optionally substituted. The notation “C₂₋₁₄ alkenyl” means an optionally substituted linear or branched hydrocarbon including 2-14 carbon atoms and at least one carbon-carbon double bond. An alkenyl group may include one, two, three, four, or more carbon-carbon double bonds. For example, C₁₈ alkenyl may include one or more double bonds. A C₁₈ alkenyl group including two double bonds may be a linoleyl group. Unless otherwise specified, an alkenyl group described herein refers to both unsubstituted and substituted alkenyl groups.

[1165] As used herein, the term “alkynyl”, “alkynyl group”, or “alkynylene” means a linear or branched hydrocarbon including two or more carbon atoms (e.g., two, three, four, five, six, seven, eight, nine, ten, eleven, twelve, thirteen, fourteen, fifteen, sixteen, seventeen, eighteen, nineteen, twenty, or more carbon atoms) and at least one carbon-carbon triple bond, which is optionally substituted. The notation “C₂₋₁₄ alkynyl” means an optionally substituted linear or branched hydrocarbon including 2-14 carbon atoms and at least one carbon-carbon triple bond.

[1166] An alkynyl group may include one, two, three, four, or more carbon-carbon triple bonds. For example, C₁₈ alkynyl may include one or more carbon-carbon triple bonds. Unless otherwise specified, an alkynyl group described herein refers to both unsubstituted and substituted alkynyl groups.

[1167] As used herein, the term “carbocycle” or “carbocyclic group” means an optionally substituted mono- or multi-cyclic system including one or more rings of carbon atoms. Rings may be three, four, five, six, seven, eight, nine, ten, eleven, twelve, thirteen, fourteen, fifteen, sixteen, seventeen, eighteen, nineteen, or twenty membered rings. The notation “C₃₋₆ carbocycle” means a carbocycle including a single ring having 3-6 carbon atoms. Carbocycles may include one or more carbon-carbon double or triple bonds and may be non-aromatic or aromatic (e.g., cycloalkyl or aryl groups). Examples of carbocycles include cyclopropyl, cyclopentyl, cyclohexyl, phenyl, naphthyl, and 1,2 dihydronaphthyl groups. The term “cycloalkyl” as used herein means a non-aromatic carbocycle and may or may not include any double or triple bond. Unless otherwise specified, carbocycles described herein refers to both unsubstituted and substituted carbocycle groups, i.e., optionally substituted carbocycles.

[1168] As used herein, the term “heterocycle” or “heterocyclic group” means an optionally substituted mono- or multi-cyclic system including one or more rings, where at least one ring includes at least one heteroatom. Heteroatoms may be, for example, nitrogen, oxygen, or sulfur atoms. Rings may be three, four, five, six, seven, eight, nine, ten, eleven, twelve, thirteen, or fourteen membered rings. Heterocycles may include one or more double or triple bonds and may be non-aromatic or aromatic (e.g., heterocycloalkyl or heteroaryl groups). Examples of heterocycles include imidazolyl, imidazolidinyl, oxazolyl, oxazolidinyl, thiazolyl, thiazolidinyl, pyrazolidinyl, pyrazolyl, isoxazolidinyl, isoxazolyl, isothiazolidinyl, isothiazolyl, morpholinyl, pyrrolyl, pyrrolidinyl, furyl, tetrahydrofuryl, thiophenyl, pyridinyl, piperidinyl, quinolyl, and isoquinolyl groups. The term “heterocycloalkyl” as used herein means a non-aromatic heterocycle and may or may not include any double or triple bond. Unless otherwise specified, heterocycles described herein refers to both unsubstituted and substituted heterocycle groups, i.e., optionally substituted heterocycles.

[1169] As used herein, the term “heteroalkyl”, “heteroalkenyl”, or “heteroalkynyl”, refers respectively to an alkyl, alkenyl, alkynyl group, as defined herein, which further comprises one or more (e.g., 1, 2, 3, or 4) heteroatoms (e.g., oxygen, sulfur, nitrogen, boron, silicon, phosphorus) wherein the one or more heteroatoms is inserted between adjacent carbon atoms within the parent carbon chain and/or one or more heteroatoms is inserted between a carbon atom and the parent molecule, i.e., between the point of attachment. Unless otherwise specified, heteroalkyls, heteroalkenyls, or heteroalkynyls described herein refers to both unsubstituted and substituted heteroalkyls, heteroalkenyls, or heteroalkynyls, i.e., optionally substituted heteroalkyls, heteroalkenyls, or heteroalkynyls.

[1170] As used herein, a “biodegradable group” is a group that may facilitate faster metabolism of a lipid in a mammalian entity. A biodegradable group may be selected from the group consisting of, but is not limited to, —C(O)O—, —OC(O)—, —C(O)N(R′)—, —N(R′)C(O)—, —C(O)—, —C(S)—, —C(S)S—, —SC(S)—, —CH(OH)—, —P(O)(OR′)O—, —S(O)₂—, an aryl group, and a heteroaryl group. As used herein, an “aryl group” is an optionally substituted carbocyclic group including one or more aromatic rings. Examples of aryl groups include phenyl and naphthyl groups. As used herein, a “heteroaryl group” is an optionally substituted heterocyclic group including one or more aromatic rings. Examples of heteroaryl groups include pyrrolyl, furyl, thiophenyl, imidazolyl, oxazolyl, and thiazolyl. Both aryl and heteroaryl groups may be optionally substituted. For example, M and M′ can be selected from the non-limiting group consisting of optionally substituted phenyl, oxazole, and thiazole. In the Formulas herein, M and M′ can be independently selected from the list of biodegradable groups above. Unless otherwise specified, aryl or heteroaryl groups described herein refers to both unsubstituted and substituted groups, i.e., optionally substituted aryl or heteroaryl groups.

[1171] Alkyl, alkenyl, and cyclyl (e.g., carbocyclyl and heterocyclyl) groups may be optionally substituted unless otherwise specified. Optional substituents may be selected from the group consisting of, but are not limited to, a halogen atom (e.g., a chloride, bromide, fluoride, or iodide group), a carboxylic acid (e.g., C(O)OH), an alcohol (e.g., a hydroxyl, OH), an ester (e.g., C(O)OR OC(O)R), an aldehyde (e.g., C(O)H), a carbonyl (e.g., C(O)R, alternatively represented by C═O), an acyl halide (e.g., C(O)X, in which X is a halide selected from bromide, fluoride, chloride, and iodide), a carbonate (e.g., OC(O)OR), an alkoxy (e.g., OR), an acetal (e.g., C(OR)₂R″″, in which each OR are alkoxy groups that can be the same or different and R″″ is an alkyl or alkenyl group), a phosphate (e.g., P(O)₄³—), a thiol (e.g., SH), a sulfoxide (e.g., S(O)R), a sulfinic acid (e.g., S(O)OH), a sulfonic acid (e.g., S(O)₂OH), a thial (e.g., C(S)H), a sulfate (e.g., S(O)₄²—), a sulfonyl (e.g., S(O)₂), an amide (e.g., C(O)NR₂, or N(R)C(O)R), an azido (e.g., N₃), a nitro (e.g., NO₂), a cyano (e.g., CN), an isocyano (e.g., NC), an acyloxy (e.g., OC(O)R), an amino (e.g., NR₂, NRH, or NH₂), a carbamoyl (e.g., OC(O)NR₂, OC(O)NRH, or OC(O)NH₂), a sulfonamide (e.g., S(O)₂NR₂, S(O)₂NRH, S(O)₂NH₂, N(R)S(O)₂R, N(H)S(O)₂R, N(R)S(O)₂H, or N(H)S(O)₂H), an alkyl group, an alkenyl group, and a cyclyl (e.g., carbocyclyl or heterocyclyl) group. In any of the preceding, R is an alkyl or alkenyl group, as defined herein. In some embodiments, the substituent groups themselves may be further substituted with, for example, one, two, three, four, five, or six substituents as defined herein. For example, a C₁₋₆ alkyl group may be further substituted with one, two, three, four, five, or six substituents as described herein.

[1172] Compounds of the disclosure that contain nitrogens can be converted to N-oxides by treatment with an oxidizing agent (e.g., 3-chloroperoxybenzoic acid (mCPBA) and/or hydrogen peroxides) to afford other compounds of the disclosure. Thus, all shown and claimed nitrogen-containing compounds are considered, when allowed by valency and structure, to include both the compound as shown and its N-oxide derivative (which can be designated as N→O or N+—O—). Furthermore, in other instances, the nitrogens in the compounds of the disclosure can be converted to N-hydroxy or N-alkoxy compounds. For example, N-hydroxy compounds can be prepared by oxidation of the parent amine by an oxidizing agent such as m CPBA. All shown and claimed nitrogen-containing compounds are also considered, when allowed by valency and structure, to cover both the compound as shown and its N-hydroxy (i.e., N—OH) and N-alkoxy (i.e., N—OR, wherein R is substituted or unsubstituted C₁-C₆ alkyl, C₁-C₆ alkenyl, C₁-C₆ alkynyl, 3-14-membered carbocycle or 3-14-membered heterocycle) derivatives.

### Exemplary Additional LNP Components

[1173] The lipid composition of a pharmaceutical composition disclosed herein can include one or more components in addition to those described above. For example, the lipid composition can include one or more permeability enhancer molecules, carbohydrates, polymers, surface altering agents (e.g., surfactants), or other components. For example, a permeability enhancer molecule can be a molecule described by U.S. Patent Application Publication No. 2005/0222064. Carbohydrates can include simple sugars (e.g., glucose) and polysaccharides (e.g., glycogen and derivatives and analogs thereof).

[1174] A polymer can be included in and/or used to encapsulate or partially encapsulate a pharmaceutical composition disclosed herein (e.g., a pharmaceutical composition in lipid nanoparticle form). A polymer can be biodegradable and/or biocompatible. A polymer can be selected from, but is not limited to, polyamines, polyethers, polyamides, polyesters, polycarbamates, polyureas, polycarbonates, polystyrenes, polyimides, polysulfones, polyurethanes, polyacetylenes, polyethylenes, polyethyleneimines, polyisocyanates, polyacrylates, polymethacrylates, polyacrylonitriles, and polyarylates.

### LNPs Comprising Metabolic Reprogramming Molecules and Membrane Anchoring Moieties

[1175] Disclosed herein are, inter alia, LNP compositions comprising polynucleotides encoding metabolic reprogramming molecules and membrane anchoring moieties for use in suppressing T cells (e.g., decreasing the level of L-tryptophan and/or increasing the level of Kynurenine), for treating a disease associated with an aberrant T cell function, or for inhibiting an immune response in a subject. In another embodiment, the invention pertains to LNPs comprising a polynucleotide comprising an mRNA encoding (i) a metabolic reprogramming molecule, e.g., an IDO molecule; a TDO molecule, or a combination thereof and (ii) a membrane anchoring moiety. The LNP compositions of the present disclosure can be used to reprogram dendritic cells, suppress T cells and/or induce immune tolerance in vivo or ex vivo.

[1176] In an aspect, an LNP composition comprising a polynucleotide encoding a metabolic reprogramming molecule, comprises: (i) an ionizable lipid, e.g., an amino lipid; (ii) a sterol or other structural lipid; (iii) a non-cationic helper lipid or phospholipid; and (iv) a PEG-lipid.

[1177] In an aspect, an LNP composition comprising a polynucleotide encoding IDO (e.g., IDO1 or IDO2), comprises: (i) an ionizable lipid, e.g., an amino lipid; (ii) a sterol or other structural lipid; (iii) a non-cationic helper lipid or phospholipid; and (iv) a PEG-lipid.

[1178] In an aspect, an LNP composition comprising a polynucleotide encoding TDO, comprises: (i) an ionizable lipid, e.g., an amino lipid; (ii) a sterol or other structural lipid; (iii) a non-cationic helper lipid or phospholipid; and (iv) a PEG-lipid.

[1179] In another aspect, the LNP compositions of the disclosure are used in a method of treating a disease associated with an aberrant T cell function in a subject or a method of inhibiting an immune response in a subject.

[1180] In an aspect, an LNP composition comprising a polynucleotide encoding a metabolic reprogramming molecule, can be administered with an additional agent, e.g., as described herein.

[1181] Additional features of LNP compositions for use in combination therapy are provided in the section titled “LNPs for therapy.”

[1182] The ratio between the lipid composition and the polynucleotide range can be from about 10:1 to about 60:1 (wt/wt).

### Nanoparticle Compositions

[1183] In some embodiments, the pharmaceutical compositions disclosed herein are Formulated as lipid nanoparticles (LNP). Accordingly, the present disclosure also provides nanoparticle compositions comprising (i) a lipid composition comprising a delivery agent such as compound as described herein, and (ii) a polynucleotide encoding a polypeptide of the invention. In such nanoparticle composition, the lipid composition disclosed herein can encapsulate the polynucleotide encoding a polypeptide of the invention.

[1184] Nanoparticle compositions are typically sized on the order of micrometers or smaller and can include a lipid bilayer. Nanoparticle compositions encompass lipid nanoparticles (LNPs), liposomes (e.g., lipid vesicles), and lipoplexes. For example, a nanoparticle composition can be a liposome having a lipid bilayer with a diameter of 500 nm or less.

[1185] Nanoparticle compositions include, for example, lipid nanoparticles (LNPs), liposomes, and lipoplexes. In some embodiments, nanoparticle compositions are vesicles including one or more lipid bilayers. In certain embodiments, a nanoparticle composition includes two or more concentric bilayers separated by aqueous compartments. Lipid bilayers can be functionalized and/or crosslinked to one another. Lipid bilayers can include one or more ligands, proteins, or channels.

[1186] In one embodiment, a lipid nanoparticle comprises an ionizable amino lipid, a structural lipid, a phospholipid, and mRNA. In some embodiments, the LNP comprises an ionizable amino lipid, a PEG-modified lipid, a sterol and a structural lipid. In some embodiments, the LNP has a molar ratio of about 40-50% ionizable amino lipid; about 5-15% structural lipid; about 30-45% sterol; and about 1-5% PEG-modified lipid.

[1187] In some embodiments, the LNP has a polydispersity value of less than 0.4. In some embodiments, the LNP has a net neutral charge at a neutral pH. In some embodiments, the LNP has a mean diameter of 50-150 nm. In some embodiments, the LNP has a mean diameter of 80-100 nm.

[1188] As generally defined herein, the term “lipid” refers to a small molecule that has hydrophobic or amphiphilic properties. Lipids may be naturally occurring or synthetic. Examples of classes of lipids include, but are not limited to, fats, waxes, sterol-containing metabolites, vitamins, fatty acids, glycerolipids, glycerophospholipids, sphingolipids, saccharolipids, and polyketides, and prenol lipids. In some instances, the amphiphilic properties of some lipids leads them to form liposomes, vesicles, or membranes in aqueous media.

[1189] In some embodiments, a lipid nanoparticle (LNP) may comprise an ionizable amino lipid. As used herein, the term “ionizable amino lipid” has its ordinary meaning in the art and may refer to a lipid comprising one or more charged moieties. In some embodiments, an ionizable amino lipid may be positively charged or negatively charged. An ionizable amino lipid may be positively charged, in which case it can be referred to as “cationic lipid”. In certain embodiments, an ionizable amino lipid molecule may comprise an amine group, and can be referred to as an ionizable amino lipid. As used herein, a “charged moiety” is a chemical moiety that carries a formal electronic charge, e.g., monovalent (+1, or −1), divalent (+2, or −2), trivalent (+3, or −3), etc. The charged moiety may be anionic (i.e., negatively charged) or cationic (i.e., positively charged). Examples of positively-charged moieties include amine groups (e.g., primary, secondary, and/or tertiary amines), ammonium groups, pyridinium group, guanidine groups, and imidizolium groups. In a particular embodiment, the charged moieties comprise amine groups. Examples of negatively-charged groups or precursors thereof, include carboxylate groups, sulfonate groups, sulfate groups, phosphonate groups, phosphate groups, hydroxyl groups, and the like. The charge of the charged moiety may vary, in some cases, with the environmental conditions, for example, changes in pH may alter the charge of the moiety, and/or cause the moiety to become charged or uncharged. In general, the charge density of the molecule may be selected as desired.

[1190] It should be understood that the terms “charged” or “charged moiety” does not refer to a “partial negative charge” or “partial positive charge” on a molecule. The terms “partial negative charge” and “partial positive charge” are given its ordinary meaning in the art. A “partial negative charge” may result when a functional group comprises a bond that becomes polarized such that electron density is pulled toward one atom of the bond, creating a partial negative charge on the atom. Those of ordinary skill in the art will, in general, recognize bonds that can become polarized in this way.

[1191] The ionizable amino lipid is sometimes referred to in the art as an “ionizable cationic lipid”. In one embodiment, the ionizable amino lipid may have a positively charged hydrophilic head and a hydrophobic tail that are connected via a linker structure.

[1192] In addition to these, an ionizable amino lipid may also be a lipid including a cyclic amine group.

[1193] In one embodiment, the ionizable amino lipid may be selected from, but not limited to, an ionizable amino lipid described in International Publication Nos. WO2013086354 and WO2013116126; the contents of each of which are herein incorporated by reference in their entirety.

[1194] In yet another embodiment, the ionizable amino lipid may be selected from, but not limited to, Formula CLI-CLXXXXII of U.S. Pat. No. 7,404,969; each of which is herein incorporated by reference in their entirety.

[1195] In one embodiment, the lipid may be a cleavable lipid such as those described in International Publication No. WO2012170889, herein incorporated by reference in its entirety. In one embodiment, the lipid may be synthesized by methods known in the art and/or as described in International Publication Nos. WO2013086354; the contents of each of which are herein incorporated by reference in their entirety.

[1196] Nanoparticle compositions can be characterized by a variety of methods. For example, microscopy (e.g., transmission electron microscopy or scanning electron microscopy) can be used to examine the morphology and size distribution of a nanoparticle composition. Dynamic light scattering or potentiometry (e.g., potentiometric titrations) can be used to measure zeta potentials. Dynamic light scattering can also be utilized to determine particle sizes. Instruments such as the Zetasizer Nano ZS (Malvern Instruments Ltd, Malvern, Worcestershire, UK) can also be used to measure multiple characteristics of a nanoparticle composition, such as particle size, polydispersity index, and zeta potential.

[1197] The size of the nanoparticles can help counter biological reactions such as, but not limited to, inflammation, or can increase the biological effect of the polynucleotide.

[1198] As used herein, “size” or “mean size” in the context of nanoparticle compositions refers to the mean diameter of a nanoparticle composition.

[1199] In one embodiment, the polynucleotide encoding a polypeptide are Formulated in lipid nanoparticles having a diameter from about 10 to about 100 nm such as, but not limited to, about 10 to about 20 nm, about 10 to about 30 nm, about 10 to about 40 nm, about 10 to about 50 nm, about 10 to about 60 nm, about 10 to about 70 nm, about 10 to about 80 nm, about 10 to about 90 nm, about 20 to about 30 nm, about 20 to about 40 nm, about 20 to about 50 nm, about 20 to about 60 nm, about 20 to about 70 nm, about 20 to about 80 nm, about 20 to about 90 nm, about 20 to about 100 nm, about 30 to about 40 nm, about 30 to about 50 nm, about 30 to about 60 nm, about 30 to about 70 nm, about 30 to about 80 nm, about 30 to about 90 nm, about 30 to about 100 nm, about 40 to about 50 nm, about 40 to about 60 nm, about 40 to about 70 nm, about 40 to about 80 nm, about 40 to about 90 nm, about 40 to about 100 nm, about 50 to about 60 nm, about 50 to about 70 nm, about 50 to about 80 nm, about 50 to about 90 nm, about 50 to about 100 nm, about 60 to about 70 nm, about 60 to about 80 nm, about 60 to about 90 nm, about 60 to about 100 nm, about 70 to about 80 nm, about 70 to about 90 nm, about 70 to about 100 nm, about 80 to about 90 nm, about 80 to about 100 nm and/or about 90 to about 100 nm.

[1200] In one embodiment, the nanoparticles have a diameter from about 10 to 500 nm. In one embodiment, the nanoparticle has a diameter greater than 100 nm, greater than 150 nm, greater than 200 nm, greater than 250 nm, greater than 300 nm, greater than 350 nm, greater than 400 nm, greater than 450 nm, greater than 500 nm, greater than 550 nm, greater than 600 nm, greater than 650 nm, greater than 700 nm, greater than 750 nm, greater than 800 nm, greater than 850 nm, greater than 900 nm, greater than 950 nm or greater than 1000 nm.

In some embodiments, the largest dimension of a nanoparticle composition is 1 μm or shorter (e.g., 1 μm, 900 nm, 800 nm, 700 nm, 600 nm, 500 nm, 400 nm, 300 nm, 200 nm, 175 nm, 150 nm, 125 nm, 100 nm, 75 nm, 50 nm, or shorter).

[1201] A nanoparticle composition can be relatively homogenous. A polydispersity index can be used to indicate the homogeneity of a nanoparticle composition, e.g., the particle size distribution of the nanoparticle composition. A small (e.g., less than 0.3) polydispersity index generally indicates a narrow particle size distribution. A nanoparticle composition can have a polydispersity index from about 0 to about 0.25, such as 0.01, 0.02, 0.03, 0.04, 0.05, 0.06, 0.07, 0.08, 0.09, 0.10, 0.11, 0.12, 0.13, 0.14, 0.15, 0.16, 0.17, 0.18, 0.19, 0.20, 0.21, 0.22, 0.23, 0.24, or 0.25. In some embodiments, the polydispersity index of a nanoparticle composition disclosed herein can be from about 0.10 to about 0.20.

[1202] The zeta potential of a nanoparticle composition can be used to indicate the electro kinetic potential of the composition. For example, the zeta potential can describe the surface charge of a nanoparticle composition. Nanoparticle compositions with relatively low charges, positive or negative, are generally desirable, as more highly charged species can interact undesirably with cells, tissues, and other elements in the body. In some embodiments, the zeta potential of a nanoparticle composition disclosed herein can be from about −10 mV to about +20 mV, from about −10 mV to about +15 mV, from about 10 mV to about +10 mV, from about −10 mV to about +5 mV, from about −10 mV to about 0 mV, from about −10 mV to about −5 mV, from about −5 mV to about +20 mV, from about −5 mV to about +15 mV, from about −5 mV to about +10 mV, from about −5 mV to about +5 mV, from about −5 mV to about 0 mV, from about 0 mV to about +20 mV, from about 0 mV to about +15 mV, from about 0 mV to about +10 mV, from about 0 mV to about +5 mV, from about +5 mV to about +20 mV, from about +5 mV to about +15 mV, or from about +5 mV to about +10 mV.

[1203] In some embodiments, the zeta potential of the lipid nanoparticles can be from about 0 mV to about 100 mV, from about 0 mV to about 90 mV, from about 0 mV to about 80 mV, from about 0 mV to about 70 mV, from about 0 mV to about 60 mV, from about 0 mV to about 50 mV, from about 0 mV to about 40 mV, from about 0 mV to about 30 mV, from about 0 mV to about 20 mV, from about 0 mV to about 10 mV, from about 10 mV to about 100 mV, from about 10 mV to about 90 mV, from about 10 mV to about 80 mV, from about 10 mV to about 70 mV, from about 10 mV to about 60 mV, from about 10 mV to about 50 mV, from about 10 mV to about 40 mV, from about 10 mV to about 30 mV, from about 10 mV to about 20 mV, from about 20 mV to about 100 mV, from about 20 mV to about 90 mV, from about 20 mV to about 80 mV, from about 20 mV to about 70 mV, from about 20 mV to about 60 mV, from about 20 mV to about 50 mV, from about 20 mV to about 40 mV, from about 20 mV to about 30 mV, from about 30 mV to about 100 mV, from about 30 mV to about 90 mV, from about 30 mV to about 80 mV, from about 30 mV to about 70 mV, from about 30 mV to about 60 mV, from about 30 mV to about 50 mV, from about 30 mV to about 40 mV, from about 40 mV to about 100 mV, from about 40 mV to about 90 mV, from about 40 mV to about 80 mV, from about 40 mV to about 70 mV, from about 40 mV to about 60 mV, and from about 40 mV to about 50 mV. In some embodiments, the zeta potential of the lipid nanoparticles can be from about 10 mV to about 50 mV, from about 15 mV to about 45 mV, from about 20 mV to about 40 mV, and from about 25 mV to about 35 mV. In some embodiments, the zeta potential of the lipid nanoparticles can be about 10 mV, about 20 mV, about 30 mV, about 40 mV, about 50 mV, about 60 mV, about 70 mV, about 80 mV, about 90 mV, and about 100 mV.

[1204] The term “encapsulation efficiency” of a polynucleotide describes the amount of the polynucleotide that is encapsulated by or otherwise associated with a nanoparticle composition after preparation, relative to the initial amount provided. As used herein, “encapsulation” can refer to complete, substantial, or partial enclosure, confinement, surrounding, or encasement.

[1205] Encapsulation efficiency is desirably high (e.g., close to 100%). The encapsulation efficiency can be measured, for example, by comparing the amount of the polynucleotide in a solution containing the nanoparticle composition before and after breaking up the nanoparticle composition with one or more organic solvents or detergents.

[1206] Fluorescence can be used to measure the amount of free polynucleotide in a solution. For the nanoparticle compositions described herein, the encapsulation efficiency of a polynucleotide can be at least 50%, for example 50%, 55%, 60%, 65%, 70%, 75%, 80%, 85%, 90%, 91%, 92%, 93%, 94%, 95%, 96%, 97%, 98%, 99%, or 100%. In some embodiments, the encapsulation efficiency can be at least 80%. In certain embodiments, the encapsulation efficiency can be at least 90%.

[1207] The amount of a polynucleotide present in a pharmaceutical composition disclosed herein can depend on multiple factors such as the size of the polynucleotide, desired target and/or application, or other properties of the nanoparticle composition as well as on the properties of the polynucleotide.

[1208] For example, the amount of an mRNA useful in a nanoparticle composition can depend on the size (expressed as length, or molecular mass), sequence, and other characteristics of the mRNA. The relative amounts of a polynucleotide in a nanoparticle composition can also vary.

[1209] The relative amounts of the lipid composition and the polynucleotide present in a lipid nanoparticle composition of the present disclosure can be optimized according to considerations of efficacy and tolerability. For compositions including an mRNA as a polynucleotide, the N:P ratio can serve as a useful metric.

[1210] As the N:P ratio of a nanoparticle composition controls both expression and tolerability, nanoparticle compositions with low N:P ratios and strong expression are desirable. N:P ratios vary according to the ratio of lipids to RNA in a nanoparticle composition.

[1211] In general, a lower N:P ratio is preferred. The one or more RNA, lipids, and amounts thereof can be selected to provide an N:P ratio from about 2:1 to about 30:1, such as 2:1, 3:1, 4:1, 5:1, 6:1, 7:1, 8:1, 9:1, 10:1, 12:1, 14:1, 16:1, 18:1, 20:1, 22:1, 24:1, 26:1, 28:1, or 30:1. In certain embodiments, the N:P ratio can be from about 2:1 to about 8:1. In other embodiments, the N:P ratio is from about 5:1 to about 8:1. In certain embodiments, the N:P ratio is between 5:1 and 6:1. In one specific aspect, the N:P ratio is about is about 5.67:1.

[1212] In addition to providing nanoparticle compositions, the present disclosure also provides methods of producing lipid nanoparticles comprising encapsulating a polynucleotide. Such method comprises using any of the pharmaceutical compositions disclosed herein and producing lipid nanoparticles in accordance with methods of production of lipid nanoparticles known in the art. See, e.g., Wang et al. (2015) “Delivery of oligonucleotides with lipid nanoparticles” Adv. Drug Deliv. Rev. 87:68-80; Silva et al. (2015) “Delivery Systems for Biopharmaceuticals. Part I: Nanoparticles and Microparticles” Curr. Pharm. Technol. 16: 940-954; Naseri et al. (2015) “Solid Lipid Nanoparticles and Nanostructured Lipid Carriers: Structure, Preparation and Application” Adv. Pharm. Bull. 5:305-13; Silva et al. (2015) “Lipid nanoparticles for the delivery of biopharmaceuticals” Curr. Pharm. Biotechnol. 16:291-302, and references cited therein.

[1213] In some embodiments, the ratio between the lipid composition and the polynucleotide can be about 10:1, 11:1, 12:1, 13:1, 14:1, 15:1, 16:1, 17:1, 18:1, 19:1, 20:1, 21:1, 22:1, 23:1, 24:1, 25:1, 26:1, 27:1, 28:1, 29:1, 30:1, 31:1, 32:1, 33:1, 34:1, 35:1, 36:1, 37:1, 38:1, 39:1, 40:1, 41:1, 42:1, 43:1, 44:1, 45:1, 46:1, 47:1, 48:1, 49:1, 50:1, 51:1, 52:1, 53:1, 54:1, 55:1, 56:1, 57:1, 58:1, 59:1 or 60:1 (wt/wt). In some embodiments, the wt/wt ratio of the lipid composition to the polynucleotide encoding a therapeutic agent is about 20:1 or about 15:1.

[1214] In some embodiments, the pharmaceutical composition disclosed herein can contain more than one polypeptides. For example, a pharmaceutical composition disclosed herein can contain two or more polynucleotides (e.g., RNA, e.g., mRNA).

[1215] In one embodiment, the lipid nanoparticles described herein can comprise polynucleotides (e.g., mRNA) in a lipid:polynucleotide weight ratio of 5:1, 10:1, 15:1, 20:1, 25:1, 30:1, 35:1, 40:1, 45:1, 50:1, 55:1, 60:1 or 70:1, or a range or any of these ratios such as, but not limited to, 5:1 to about 10:1, from about 5:1 to about 15:1, from about 5:1 to about 20:1, from about 5:1 to about 25:1, from about 5:1 to about 30:1, from about 5:1 to about 35:1, from about 5:1 to about 40:1, from about 5:1 to about 45:1, from about 5:1 to about 50:1, from about 5:1 to about 55:1, from about 5:1 to about 60:1, from about 5:1 to about 70:1, from about 10:1 to about 15:1, from about 10:1 to about 20:1, from about 10:1 to about 25:1, from about 10:1 to about 30:1, from about 10:1 to about 35:1, from about 10:1 to about 40:1, from about 10:1 to about 45:1, from about 10:1 to about 50:1, from about 10:1 to about 55:1, from about 10:1 to about 60:1, from about 10:1 to about 70:1, from about 15:1 to about 20:1, from about 15:1 to about 25:1, from about 15:1 to about 30:1, from about 15:1 to about 35:1, from about 15:1 to about 40:1, from about 15:1 to about 45:1, from about 15:1 to about 50:1, from about 15:1 to about 55:1, from about 15:1 to about 60:1 or from about 15:1 to about 70:1.

[1216] In one embodiment, the lipid nanoparticles described herein can comprise the polynucleotide in a concentration from approximately 0.1 mg/ml to 2 mg/ml such as, but not limited to, 0.1 mg/ml, 0.2 mg/ml, 0.3 mg/ml, 0.4 mg/ml, 0.5 mg/ml, 0.6 mg/ml, 0.7 mg/ml, 0.8 mg/ml, 0.9 mg/ml, 1.0 mg/ml, 1.1 mg/ml, 1.2 mg/ml, 1.3 mg/ml, 1.4 mg/ml, 1.5 mg/ml, 1.6 mg/ml, 1.7 mg/ml, 1.8 mg/ml, 1.9 mg/ml, 2.0 mg/ml or greater than 2.0 mg/ml.

### Methods of Using LNP Compositions Comprising a Metabolic Reprogramming Molecule

[1217] In an aspect, the disclosure provides a composition comprising a lipid nanoparticle (LNP) comprising a polynucleotide comprising an mRNA which encodes a metabolic reprogramming molecule chosen from: an IDO molecule; a TDO molecule, or a combination thereof, in the treatment of a disease associated with an aberrant T cell function in a subject.

[1218] In another aspect, the disclosure provides a composition comprising a lipid nanoparticle (LNP) comprising a polynucleotide comprising an mRNA which encodes a metabolic reprogramming molecule chosen from: an IDO molecule; a TDO molecule, or a combination thereof, for inhibiting an immune response in a subject.

[1219] In another aspect, the disclosure provides a composition comprising a lipid nanoparticle (LNP) comprising a polynucleotide comprising an mRNA which encodes a metabolic reprogramming molecule chosen from: an IDO molecule; a TDO molecule, or a combination thereof, for inducing immune tolerance, e.g., in a subject.

[1220] In another aspect, the disclosure provides a composition comprising a lipid nanoparticle (LNP) comprising a polynucleotide comprising an mRNA which encodes a metabolic reprogramming molecule chosen from: an IDO molecule; a TDO molecule, or a combination thereof, for suppressing T cells.

[1221] In another aspect, the disclosure provides a composition comprising a lipid nanoparticle (LNP) comprising a polynucleotide comprising an mRNA which encodes a metabolic reprogramming molecule chosen from: an IDO molecule; a TDO molecule, or a combination thereof, for reprogramming myeloid and/or dendritic cells, e.g., to have a tolerogenic phenotype.

[1222] In another aspect, the disclosure provides a composition comprising a lipid nanoparticle (LNP) comprising a polynucleotide comprising an mRNA which encodes a metabolic reprogramming molecule chosen from: an IDO molecule; a TDO molecule, or a combination thereof, for use, in the treatment of a disease associated with an aberrant T cell function in a subject.

[1223] In a related aspect, provided herein is a method of treating a disease associated with aberrant T cell function in a subject, comprising administering to the subject an effective amount of a lipid nanoparticle (LNP) comprising a polynucleotide comprising an mRNA which encodes a metabolic reprogramming molecule chosen from: an IDO molecule; a TDO molecule, or a combination thereof.

[1224] In embodiments of any of the methods disclosed herein, administration of the LNP results in an increase in the level, e.g., expression and/or activity, of Kynurenine (Kyn) in, e.g., a sample comprising plasma, serum or a population of cells. In embodiments, the increase in the level of Kyn is compared to an otherwise similar sample which has not been contacted with the LNP composition comprising a metabolic reprogramming molecule. In embodiments, the increase in the level of Kyn is about 1.2-15 fold.

[1225] In embodiments of any of the methods disclosed herein, administration of the LNP results in an increase in the level, e.g., expression and/or activity, of T regulatory cells (T regs), e.g., Foxp3+ T regulatory cells. In embodiments, the increase in the level of Treg cells is compared to an otherwise similar population of cells which has not been contacted with the LNP composition comprising a metabolic reprogramming molecule. In embodiments, the increase in the level of T reg cells is about 1.2-10 fold.

[1226] In embodiments of any of the methods disclosed herein, administration of the LNP results in (i) reduced engraftment of donor cells, e.g., donor immune cells, e.g., T cells, in a subject or host, e.g., a human, a non-human primate (NIP), rat or mouse; (ii) reduction in the level, activity and/or secretion of IFNg from engrafted donor immune cells, e.g., T cells, in a subject or host, e.g., a human, a non-human primate (NHP), rat or mouse; and/or (iii) an absence of, prevention of, or delay in the onset of, graft vs host disease (GvHD) in a subject or a host, e.g., a human, a non-human primate (NHP), rat or mouse. In embodiments, the donor immune cells specified in (i) or (ii) comprise T cells, e.g., CD8+ T cells, CD4+ T cells, or T regulatory cells (e.g., CD25+ and/or FoxP3+ T cells). In embodiments, the reduction in donor cell engraftment is about 1.5-10 fold, e.g., as measured by an assay described herein.

[1227] In embodiments, the reduction in IFNg level, activity and/or secretion of IFNg is about 1.5-10 fold, e.g., as measured by an assay described herein.

[1228] In embodiments, the delay in onset of GvHD is a delay of at least 1 week, 2 weeks, 3 weeks, 1 month, 2 months, 3 months, 4 months, 5 months, 6 months, 7 months, 8 months, 9 months, 10 months, 11 months, 12 months, 1.5 years, or 2 years.

[1229] In embodiments, any one of (i)-(iii) is compared to an otherwise similar host, e.g., a host that has not been contacted with the LNP composition comprising a metabolic reprogramming molecule.

[1230] In embodiments of any of the methods disclosed herein, administration of the LNP results in amelioration or reduction of joint swelling, e.g., severity of joint swelling, e.g., as described herein, in a subject, e.g., as measured by an assay described herein. In embodiments, swelling is determined by an arthritis score, e.g., as described herein. In embodiments, the reduction of joint swelling is compared to joint swelling in an otherwise similar subject, e.g., a subject who has not been contacted with the LNP composition comprising a metabolic reprogramming molecule.

### LNP Dosing and Dosing Regimen

[1231] In some embodiments, any of the LNP disclosed herein can be administered according to a dosing interval, e.g., as described herein. In some embodiments, the dosing interval comprises an initial dose of the LNP composition and one or more subsequent doses (e.g., 1-50 doses, 5-50 doses, 10-50 doses, 15-50 doses, 20-50 doses, 25-50 doses, 30-50 doses, 35-50 doses, 40-50 doses, 45-50 doses, 1-45 doses, 1-40 doses, 1-35 doses, 1-30 doses, 1-25 doses, 1-20 doses, 1-15 doses, 1-10 doses, 1-5 doses) of the same LNP composition.

[1232] In some embodiments, the dosing interval comprises one or more doses of the LNP composition and one or more doses of an additional agent.

[1233] In some embodiments, the dosing interval is performed over at least 1 week, 2 weeks, 3 weeks, or 4 weeks.

[1234] In some embodiments, the dosing interval comprises a cycle, e.g., a seven day cycle.

[1235] In some embodiments, the dosing interval is repeated at least 1 time, at least 2 times, at least 3 times, at least 4 times, at least 5 times, at least 6 times, at least 7 times, at least 8 times, at least 9 times, or at least 10 times. In some embodiments, the repeated dosing interval is performed over at least 2 weeks, 3 weeks, 4 weeks, 2 months, 3 months, 4 months, 5 months, 6 months, 7 months, 8 months, 9 months, 10 months, 11 months, 12 months, 13 months, 14 months, 15 months, 16 months, 17 months, 18 months, 19 months, 20 months, 21 months, 22 months, 23 months, 24 months, 3 years, 4 years or 5 years.

[1236] In some embodiments, any of the LNP disclosed herein is administered daily for at least 1 week, 2 weeks, 3 weeks, 4 weeks, 5 weeks, 6 weeks, 7 weeks, 8 weeks, 3 months, 4 months, 5 months, 6 months, 7 months, 8 months, 9 months, 10 months, 11 months or 1 year. In some embodiments, the LNP composition is administered for at least 2, 3, 4, 5, or 6 consecutive days in a seven day cycle, e.g., wherein the cycle is repeated about 1-20 times.

[1237] In some embodiments of a combination therapy disclosed herein, the LNP compositions are administered according to a dosing interval, e.g., as described herein.

[1238] In some embodiments, the dosing interval comprises an initial dose of the LNP composition, or the combination comprising a first LNP composition and a second LNP composition and one or more subsequent doses (e.g., 1-50 doses, 5-50 doses, 10-50 doses, 15-50 doses, 20-50 doses, 25-50 doses, 30-50 doses, 35-50 doses, 40-50 doses, 45-50 doses, 1-45 doses, 1-40 doses, 1-35 doses, 1-30 doses, 1-25 doses, 1-20 doses, 1-15 doses, 1-10 doses, 1-5 doses) of the same LNP composition, or the same combination comprising a first LNP composition and a second LNP composition.

[1239] In some embodiments, the dosing interval comprises one or more doses of the LNP composition, or the combination comprising a first LNP composition and a second LNP composition, and one or more doses of an additional agent.

[1240] In some embodiments, the dosing interval is performed over at least 1 week, 2 weeks, 3 weeks, or 4 weeks.

[1241] In some embodiments, the dosing interval comprises a cycle, e.g., a seven day cycle.

[1242] In some embodiments, the dosing interval is repeated at least 1 time, at least 2 times, at least 3 times, at least 4 times, at least 5 times, at least 6 times, at least 7 times, at least 8 times, at least 9 times, or at least 10 times. In some embodiments, the repeated dosing interval is performed over at least 2 weeks, 3 weeks, 4 weeks, 2 months, 3 months, 4 months, 5 months, 6 months, 7 months, 8 months, 9 months, 10 months, 11 months, 12 months, 13 months, 14 months, 15 months, 16 months, 17 months, 18 months, 19 months, 20 months, 21 months, 22 months, 23 months, 24 months, 3 years, 4 years or 5 years.

[1243] In some embodiments, any of the LNP disclosed herein is administered daily for at least 1 week, 2 weeks, 3 weeks, 4 weeks, 5 weeks, 6 weeks, 7 weeks, 8 weeks, 3 months, 4 months, 5 months, 6 months, 7 months, 8 months, 9 months, 10 months, 11 months or 1 year. In some embodiments, the LNP composition is administered for at least 2, 3, 4, 5, or 6 consecutive days in a seven day cycle, e.g., wherein the cycle is repeated about 1-20 times.

[1244] In some embodiments of any of the LNP compositions disclosed herein, the LNP composition is administered at a dose, e.g., total dose, of about 0.1-10 mg per kg, about 0.1-9.5 mg per kg, about 0.1-9 mg per kg, about 0.1-8.5 mg per kg, about 0.1-8 mg per kg, about 0.1-7.5 mg per kg, about 0.1-7 mg per kg, about 0.1-6.5 mg per kg, about 0.1-6 mg per kg, about 0.1-5.5 mg per kg, about 0.1-5 mg per kg, about 0.1-4.5 mg per kg, about 0.1-4 mg per kg, about 0.1-3.5 mg per kg, about 0.1-3 mg per kg, about 0.1-2.5 mg per kg, about 0.1-2 mg per kg, about 0.1-1.5 mg per kg, about 0.1-1 mg per kg, about 0.1-0.9 mg per kg, about 0.1-0.8 mg per kg, about 0.1-0.7 mg per kg, about 0.1-0.6 mg per kg, or about 0.1-0.5 mg per kg.

[1245] In some embodiments of any of the LNP compositions disclosed herein, the LNP composition is administered at a dose, e.g., total dose, of about 0.2-10 mg per kg, about, 0.3-10 mg per kg, about 0.4-10 mg per kg, about 0.5-10 mg per kg, about 0.6-10 mg per kg, about 0.7-10 mg per kg, about 0.8-10 mg per kg, about 0.9-10 mg per kg, about 1-10 mg per kg, about 1.5-10 mg per kg, about 2-10 mg per kg, about 2.5-10 mg per kg, about 3-10 mg per kg, about 3.5-10 mg per kg, about 4-10 mg per kg, about 4.5-10 mg per kg, about 5-10 mg per kg, about 5.5-10 mg per kg, about 6-10 mg per kg, about 6.5-10 mg per kg, about 7-10 mg per kg, about 7.5-10 mg per kg, about 8-10 mg per kg, about 8.5-10 mg per kg, about 9-10 mg per kg, or about 9.5-10 mg per kg.

[1246] In some embodiments of any of the LNP compositions disclosed herein, the LNP composition is administered at a dose, e.g., total dose, of about 0.1 mg per kg.

[1247] In some embodiments of any of the LNP compositions disclosed herein, the LNP composition is administered at a dose, e.g., total dose, of about 0.2 mg per kg.

[1248] In some embodiments of any of the LNP compositions disclosed herein, the LNP composition is administered at a dose, e.g., total dose, of about 0.3 mg per kg.

[1249] In some embodiments of any of the LNP compositions disclosed herein, the LNP composition is administered at a dose, e.g., total dose, of about 0.4 mg per kg.

[1250] In some embodiments of any of the LNP compositions disclosed herein, the LNP composition is administered at a dose, e.g., total dose, of about 0.5 mg per kg.

[1251] In some embodiments of any of the LNP compositions disclosed herein, the LNP composition is administered at a dose, e.g., dose of each LNP, of about 0.1-10 mg per kg, about 0.1-9.5 mg per kg, about 0.1-9 mg per kg, about 0.1-8.5 mg per kg, about 0.1-8 mg per kg, about 0.1-7.5 mg per kg, about 0.1-7 mg per kg, about 0.1-6.5 mg per kg, about 0.1-6 mg per kg, about 0.1-5.5 mg per kg, about 0.1-5 mg per kg, about 0.1-4.5 mg per kg, about 0.1-4 mg per kg, about 0.1-3.5 mg per kg, about 0.1-3 mg per kg, about 0.1-2.5 mg per kg, about 0.1-2 mg per kg, about 0.1-1.5 mg per kg, about 0.1-1 mg per kg, about 0.1-0.9 mg per kg, about 0.1-0.8 mg per kg, about 0.1-0.7 mg per kg, about 0.1-0.6 mg per kg, or about 0.1-0.5 mg per kg.

[1252] In some embodiments of any of the LNP compositions disclosed herein, the LNP composition is administered at a dose, e.g., dose of each LNP, of about 0.2-10 mg per kg, about, 0.3-10 mg per kg, about 0.4-10 mg per kg, about 0.5-10 mg per kg, about 0.6-10 mg per kg, about 0.7-10 mg per kg, about 0.8-10 mg per kg, about 0.9-10 mg per kg, about 1-10 mg per kg, about 1.5-10 mg per kg, about 2-10 mg per kg, about 2.5-10 mg per kg, about 3-10 mg per kg, about 3.5-10 mg per kg, about 4-10 mg per kg, about 4.5-10 mg per kg, about 5-10 mg per kg, about 5.5-10 mg per kg, about 6-10 mg per kg, about 6.5-10 mg per kg, about 7-10 mg per kg, about 7.5-10 mg per kg, about 8-10 mg per kg, about 8.5-10 mg per kg, about 9-10 mg per kg, or about 9.5-10 mg per kg.

[1253] In some embodiments of any of the LNP compositions disclosed herein, the LNP composition is administered at a dose, e.g., dose of each LNP, of about 0.1 mg per kg.

[1254] In some embodiments of any of the LNP compositions disclosed herein, the LNP composition is administered at a dose, e.g., dose of each LNP, of about 0.2 mg per kg.

[1255] In some embodiments of any of the LNP compositions disclosed herein, the LNP composition is administered at a dose, e.g., dose of each LNP, of about 0.3 mg per kg.

[1256] In some embodiments of any of the LNP compositions disclosed herein, the LNP composition is administered at a dose, e.g., dose of each LNP, of about 0.4 mg per kg.

[1257] In some embodiments of any of the LNP compositions disclosed herein, the LNP composition is administered at a dose, e.g., dose of each LNP, of about 0.5 mg per kg.

[1258] In some embodiments of any of the LNP compositions disclosed herein, the LNP composition is administered at a dose, e.g., dose of each polynucleotide in the LNP, of about 0.1-10 mg per kg, about 0.1-9.5 mg per kg, about 0.1-9 mg per kg, about 0.1-8.5 mg per kg, about 0.1-8 mg per kg, about 0.1-7.5 mg per kg, about 0.1-7 mg per kg, about 0.1-6.5 mg per kg, about 0.1-6 mg per kg, about 0.1-5.5 mg per kg, about 0.1-5 mg per kg, about 0.1-4.5 mg per kg, about 0.1-4 mg per kg, about 0.1-3.5 mg per kg, about 0.1-3 mg per kg, about 0.1-2.5 mg per kg, about 0.1-2 mg per kg, about 0.1-1.5 mg per kg, about 0.1-1 mg per kg, about 0.1-0.9 mg per kg, about 0.1-0.8 mg per kg, about 0.1-0.7 mg per kg, about 0.1-0.6 mg per kg, or about 0.1-0.5 mg per kg.

[1259] In some embodiments of any of the LNP compositions disclosed herein, the LNP composition is administered at a dose, e.g., dose of each polynucleotide in the LNP, of about 0.2-10 mg per kg, about, 0.3-10 mg per kg, about 0.4-10 mg per kg, about 0.5-10 mg per kg, about 0.6-10 mg per kg, about 0.7-10 mg per kg, about 0.8-10 mg per kg, about 0.9-10 mg per kg, about 1-10 mg per kg, about 1.5-10 mg per kg, about 2-10 mg per kg, about 2.5-10 mg per kg, about 3-10 mg per kg, about 3.5-10 mg per kg, about 4-10 mg per kg, about 4.5-10 mg per kg, about 5-10 mg per kg, about 5.5-10 mg per kg, about 6-10 mg per kg, about 6.5-10 mg per kg, about 7-10 mg per kg, about 7.5-10 mg per kg, about 8-10 mg per kg, about 8.5-10 mg per kg, about 9-10 mg per kg, or about 9.5-10 mg per kg.

[1260] In some embodiments of any of the LNP compositions disclosed herein, the LNP composition is administered at a dose, e.g., dose of each polynucleotide in the LNP, of about 0.1 mg per kg.

[1261] In some embodiments of any of the LNP compositions disclosed herein, the LNP composition is administered at a dose, e.g., dose of each polynucleotide in the LNP, of about 0.2 mg per kg.

[1262] In some embodiments of any of the LNP compositions disclosed herein, the LNP composition is administered at a dose, e.g., dose of each polynucleotide in the LNP, of about 0.3 mg per kg.

[1263] In some embodiments of any of the LNP compositions disclosed herein, the LNP composition is administered at a dose, e.g., dose of each polynucleotide in the LNP, of about 0.4 mg per kg.

[1264] In some embodiments of any of the LNP compositions disclosed herein, the LNP composition is administered at a dose, e.g., dose of each polynucleotide in the LNP, of about 0.5 mg per kg.

[1265] In some embodiments, any of the LNP disclosed herein is administered by a route of administration chosen from: subcutaneous, intramuscular, intravenous, intranasal, oral, intraocular, or rectal. In some embodiments, the route of administration is subcutaneous.

[1266] In some embodiments, the route of administration is intramuscular. In some embodiments, the route of administration is intravenous. In some embodiments, the route of administration is In some embodiments, the route of administration is intranasal. In some embodiments, the route of administration is oral. In some embodiments, the route of administration is intraocular. In some embodiments, the route of administration is rectal.

### Diseases and Disorders

[1267] In an embodiment of any of the methods of treatment or compositions for use disclosed herein, the subject has, or is identified as having, a disease or disorder associated with aberrant T cell function. In an embodiment, the disease is an autoimmune disease, or a disease with hyper-activated immune function. In an embodiment, an LNP disclosed herein is administered to the subject to treat or ameliorate a symptom of the disease or disorder. In an embodiment, an LNP disclosed herein is administered to a subject to inhibit an immune response in the subject.

[1268] In an embodiment, the autoimmune disease is chosen from: rheumatoid arthritis (RA); graft versus host disease (GVHD) (e.g., acute GVHD or chronic GVHD); diabetes, e.g., Type 1 diabetes; inflammatory bowel disease (IBD); lupus (e.g., systemic lupus erythematosus (SLE)), multiple sclerosis: autoimmune hepatitis (e.g., Type 1 or Type 2); primary biliary cholangitis (PBC); primary sclerosing cholangitis (PSC); organ transplant associated rejection; myasthenia gravis: Parkinson's Disease; Alzheimer's Disease; amyotrophic lateral sclerosis: psoriasis: or polymyositis (also known as dermatomyositis) or atopic dermatitis.

[1269] In an embodiment, the autoimmune disease is rheumatoid arthritis (RA). In an embodiment, the autoimmune disease is graft versus host disease (GVHD) (e.g., acute GVHD or chronic GVHD). In an embodiment, the autoimmune disease is diabetes, e.g., Type 1 diabetes. In an embodiment, the autoimmune disease is inflammatory bowel disease (IBD). In an embodiment, IBD comprises colitis, ulcerative colitis, or Crohn's disease. In an embodiment, the autoimmune disease is lupus, e.g., systemic lupus erythematosus (SLE). In an embodiment, the autoimmune disease is multiple sclerosis. In an embodiment, the autoimmune disease is autoimmune hepatitis, e.g., Type 1 or Type 2. In an embodiment, the autoimmune disease is primary biliary cholangitis.

[1270] In an embodiment, the autoimmune disease is organ transplant associated rejection. In an embodiment, an organ transplant associated rejection comprises renal allograft rejection; liver transplant rejection; bone marrow transplant rejection; or stem cell transplant rejection. In an embodiment, a stem cell transplant comprises a transplant of any one or all of the following types of cells: stem cells, cord blood stem cells, hematopoietic stem cells, embryonic stem cells, cells derived from or comprising mesenchymal stem cells, and/or induced stem cells (e.g., induced pluripotent stem cells). In an embodiment, the stem cell comprises a pluripotent stem cell.

[1271] In an embodiment, the autoimmune disease is myasthenia gravis. In an embodiment, the autoimmune disease is Parkinson's disease. In an embodiment, the autoimmune disease is Alzheimer's disease. In an embodiment, the autoimmune disease is amyotrophic lateral sclerosis. In an embodiment, the autoimmune disease is psoriasis, e.g., subcutaneous or IV. In an embodiment, the autoimmune disease is polymyositis. In an embodiment, the autoimmune disease is atopic dermatitis. In an embodiment, the autoimmune disease is primary biliary cholangitis (PBC). In an embodiment, the autoimmune disease is primary sclerosing cholangitis (PSC).

[1272] In an embodiment the subject is a mammal, e.g., a human.

### Further Combination Therapies

[1273] In some embodiments, the methods of treatment or compositions for use disclosed herein, comprise administering an LNP disclosed herein in combination with an additional agent. In an embodiment, the additional agent is a standard of care for the disease or disorder, e.g., autoimmune disease. In an embodiment, the additional agent is an mRNA In some aspects, the subject for the present methods or compositions has been treated with one or more standard of care therapies. In other aspects, the subject for the present methods or compositions has not been responsive to one or more standard of care therapies.

### Sequence Optimization and Methods Thereof

[1274] In some embodiments, a polynucleotide of the disclosure comprises a sequence-optimized nucleotide sequence encoding (i) a polypeptide disclosed herein, e.g., a metabolic reprogramming molecule, e.g., an IDO molecule or a TDO molecule and (ii) a membrane anchoring moiety. In some embodiments, the polynucleotide of the disclosure comprises an open reading frame (ORF) encoding metabolic reprogramming molecule polypeptide and a membrane anchoring moiety, wherein the ORF has been sequence optimized.

[1275] The sequence-optimized nucleotide sequences disclosed herein are distinct from the corresponding wild type nucleotide acid sequences and from other known sequence-optimized nucleotide sequences, e.g., these sequence-optimized nucleic acids have unique compositional characteristics.

[1276] In some embodiments, the percentage of uracil or thymine nucleobases in a sequence-optimized nucleotide sequence (e.g., encoding an metabolic reprograming molecule, a functional fragment, or a variant thereof) is modified (e.g., reduced) with respect to the percentage of uracil or thymine nucleobases in the reference wild-type nucleotide sequence. Such a sequence is referred to as a uracil-modified or thymine-modified sequence. The percentage of uracil or thymine content in a nucleotide sequence can be determined by dividing the number of uracils or thymines in a sequence by the total number of nucleotides and multiplying by 100. In some embodiments, the sequence-optimized nucleotide sequence has a lower uracil or thymine content than the uracil or thymine content in the reference wild-type sequence. In some embodiments, the uracil or thymine content in a sequence-optimized nucleotide sequence of the disclosure is greater than the uracil or thymine content in the reference wild-type sequence and still maintain beneficial effects, e.g., increased expression and/or signaling response when compared to the reference wild-type sequence.

[1277] In some embodiments, the optimized sequences of the present disclosure contain unique ranges of uracils or thymine (if DNA) in the sequence. The uracil or thymine content of the optimized sequences can be expressed in various ways, e.g., uracil or thymine content of optimized sequences relative to the theoretical minimum (% UTM or % TTM), relative to the wild-type (% UWT or % TWT), and relative to the total nucleotide content (% UTL or % TTL). For DNA it is recognized that thymine is present instead of uracil, and one would substitute T where U appears. Thus, all the disclosures related to, e.g., % UTM, % UWT, or % UTL, with respect to RNA are equally applicable to % TTM, % TWT, or % TTL with respect to DNA.

[1278] Uracil- or thymine-content relative to the uracil or thymine theoretical minimum, refers to a parameter determined by dividing the number of uracils or thymines in a sequence-optimized nucleotide sequence by the total number of uracils or thymines in a hypothetical nucleotide sequence in which all the codons in the hypothetical sequence are replaced with synonymous codons having the lowest possible uracil or thymine content and multiplying by 100. This parameter is abbreviated herein as % UTM or % TTM.

[1279] In some embodiments, a uracil-modified sequence encoding an metabolic reprograming molecule polypeptide of the disclosure has a reduced number of consecutive uracils with respect to the corresponding wild-type nucleic acid sequence. For example, two consecutive leucines can be encoded by the sequence CUUUUG, which includes a four uracil cluster. Such a subsequence can be substituted, e.g., with CUGCUC, which removes the uracil cluster. Phenylalanine can be encoded by UUC or UUU. Thus, even if phenylalanines encoded by UUU are replaced by UUC, the synonymous codon still contains a uracil pair (UU). Accordingly, the number of phenylalanines in a sequence establishes a minimum number of uracil pairs (UU) that cannot be eliminated without altering the number of phenylalanines in the encoded polypeptide.

[1280] In some embodiments, a uracil-modified sequence encoding a metabolic reprogramming molecule and/or an metabolic reprograming molecule polypeptide of the disclosure has a reduced number of uracil triplets (UUU) with respect to the wild-type nucleic acid sequence. In some embodiments, a uracil-modified sequence encoding a metabolic reprogramming molecule and/or an metabolic reprograming molecule polypeptide has a reduced number of uracil pairs (UU) with respect to the number of uracil pairs (UU) in the wild-type nucleic acid sequence. In some embodiments, a uracil-modified sequence encoding an metabolic reprograming molecule polypeptide of the disclosure has a number of uracil pairs (UU) corresponding to the minimum possible number of uracil pairs (UU) in the wild-type nucleic acid sequence.

[1281] The phrase “uracil pairs (UU) relative to the uracil pairs (UU) in the wild type nucleic acid sequence,” refers to a parameter determined by dividing the number of uracil pairs (UU) in a sequence-optimized nucleotide sequence by the total number of uracil pairs (UU) in the corresponding wild-type nucleotide sequence and multiplying by 100. This parameter is abbreviated herein as % UUwt. In some embodiments, a uracil-modified sequence encoding an metabolic reprograming molecule polypeptide has a % UUwt between below 100%.

[1282] In some embodiments, the polynucleotide of the disclosure comprises a uracil-modified sequence encoding a metabolic reprogramming molecule polypeptide disclosed herein. In some embodiments, the uracil-modified sequence encoding a metabolic reprogramming molecule polypeptide comprises at least one chemically modified nucleobase, e.g., 5-methoxyuracil. In some embodiments, at least 95% of a nucleobase (e.g., uracil) in a uracil-modified sequence encoding a metabolic reprogramming molecule polypeptide of the disclosure are modified nucleobases. In some embodiments, at least 95% of uracil in a uracil-modified sequence encoding a metabolic reprogramming molecule polypeptide is 5-methoxyuracil. In some embodiments, the polynucleotide comprising a uracil-modified sequence further comprises a miRNA binding site, e.g., a miRNA binding site that binds to miR-122. In some embodiments, the polynucleotide comprising a uracil-modified sequence is formulated with a delivery agent, e.g., a compound having Formula (I), e.g., any of Compound Nos. 18, 25, 301, or 357.

[1283] In some embodiments, a polynucleotide of the disclosure (e.g., a polynucleotide comprising a nucleotide sequence encoding a metabolic reprogramming molecule polypeptide (e.g., the wild-type sequence, functional fragment, or variant thereof) is sequence optimized.

[1284] A sequence optimized nucleotide sequence (nucleotide sequence is also referred to as “nucleic acid” herein) comprises at least one codon modification with respect to a reference sequence (e.g., a wild-type sequence encoding a metabolic reprogramming molecule polypeptide). Thus, in a sequence-optimized nucleic acid, at least one codon is different from a corresponding codon in a reference sequence (e.g., a wild-type sequence).

[1285] In general, sequence optimized nucleic acids are generated by at least a step comprising substituting codons in a reference sequence with synonymous codons (i.e., codons that encode the same amino acid). Such substitutions can be effected, for example, by applying a codon substitution map (i.e., a table providing the codons that will encode each amino acid in the codon optimized sequence), or by applying a set of rules (e.g., if glycine is next to neutral amino acid, glycine would be encoded by a certain codon, but if it is next to a polar amino acid, it would be encoded by another codon). In addition to codon substitutions (i.e., “codon optimization”) the sequence optimization methods disclosed herein comprise additional optimization steps which are not strictly directed to codon optimization such as the removal of deleterious motifs (destabilizing motif substitution). Compositions and formulations comprising these sequence optimized nucleic acids (e.g., a RNA, e.g., an mRNA) can be administered to a subject in need thereof to facilitate in vivo expression of functionally active metabolic reprogramming molecule polypeptide.

[1286] Additional and exemplary methods of sequence optimization are disclosed in International PCT application WO 2017/201325, filed on 18 May 2017, the entire contents of which are hereby incorporated by reference.

MicroRNA (miRNA) Binding Sites

[1287] Polynucleotides of the invention can include regulatory elements, for example, microRNA (miRNA) binding sites, transcription factor binding sites, structured mRNA sequences and/or motifs, artificial binding sites engineered to act as pseudo-receptors for endogenous nucleic acid binding molecules, and combinations thereof. In some embodiments, polynucleotides including such regulatory elements are referred to as including “sensor sequences”.

[1288] In some embodiments, a polynucleotide (e.g., a ribonucleic acid (RNA), e.g., a messenger RNA (mRNA)) of the invention comprises an open reading frame (ORF) encoding a polypeptide of interest and further comprises one or more miRNA binding site(s). Inclusion or incorporation of miRNA binding site(s) provides for regulation of polynucleotides of the invention, and in turn, of the polypeptides encoded therefrom, based on tissue-specific and/or cell-type specific expression of naturally occurring miRNAs.

[1289] The present invention also provides pharmaceutical compositions and formulations that comprise any of the polynucleotides described above. In some embodiments, the composition or formulation further comprises a delivery agent.

[1290] In some embodiments, the composition or formulation can contain a polynucleotide comprising a sequence optimized nucleic acid sequence disclosed herein which encodes a polypeptide. In some embodiments, the composition or formulation can contain a polynucleotide (e.g., a RNA, e.g., an mRNA) comprising a polynucleotide (e.g., an ORF) having significant sequence identity to a sequence optimized nucleic acid sequence disclosed herein which encodes a polypeptide. In some embodiments, the polynucleotide further comprises a miRNA binding site, e.g., a miRNA binding site that binds

[1291] A miRNA, e.g., a natural-occurring miRNA, is a 19-25 nucleotide long noncoding RNA that binds to a polynucleotide and down-regulates gene expression either by reducing stability or by inhibiting translation of the polynucleotide. A miRNA sequence comprises a “seed” region, i.e., a sequence in the region of positions 2-8 of the mature miRNA. A miRNA seed can comprise positions 2-8 or 2-7 of the mature miRNA.

[1292] microRNAs derive enzymatically from regions of RNA transcripts that fold back on themselves to form short hairpin structures often termed a pre-miRNA (precursor-miRNA). A pre-miRNA typically has a two-nucleotide overhang at its 3′ end, and has 3′ hydroxyl and 5′ phosphate groups. This precursor-mRNA is processed in the nucleus and subsequently transported to the cytoplasm where it is further processed by DICER (a RNase III enzyme), to form a mature microRNA of approximately 22 nucleotides. The mature microRNA is then incorporated into a ribonuclear particle to form the RNA-induced silencing complex, RISC, which mediates gene silencing. Art-recognized nomenclature for mature miRNAs typically designates the arm of the pre-miRNA from which the mature miRNA derives; “5p” means the microRNA is from the 5-prime arm of the pre-miRNA hairpin and “3p” means the microRNA is from the 3-prime end of the pre-miRNA hairpin. A miR referred to by number herein can refer to either of the two mature microRNAs originating from opposite arms of the same pre-miRNA (e.g., either the 3p or 5p microRNA). All miRs referred to herein are intended to include both the 3p and 5p arms/sequences, unless particularly specified by the 3p or 5p designation.

[1293] As used herein, the term “microRNA (miRNA or miR) binding site” refers to a sequence within a polynucleotide, e.g., within a DNA or within an RNA transcript, including in the 5′UTR and/or 3′UTR, that has sufficient complementarity to all or a region of a miRNA to interact with, associate with or bind to the miRNA. In some embodiments, a polynucleotide of the invention comprising an ORF encoding a polypeptide of interest and further comprises one or more miRNA binding site(s). In exemplary embodiments, a 5′ UTR and/or 3′ UTR of the polynucleotide (e.g., a ribonucleic acid (RNA), e.g., a messenger RNA (mRNA)) comprises the one or more miRNA binding site(s).

[1294] A miRNA binding site having sufficient complementarity to a miRNA refers to a degree of complementarity sufficient to facilitate miRNA-mediated regulation of a polynucleotide, e.g., miRNA-mediated translational repression or degradation of the polynucleotide. In exemplary aspects of the invention, a miRNA binding site having sufficient complementarity to the miRNA refers to a degree of complementarity sufficient to facilitate miRNA-mediated degradation of the polynucleotide, e.g., miRNA-guided RNA-induced silencing complex (RISC)-mediated cleavage of mRNA. The miRNA binding site can have complementarity to, for example, a 19-25 nucleotide long miRNA sequence, to a 19-23 nucleotide long miRNA sequence, or to a 22-nucleotide long miRNA sequence. A miRNA binding site can be complementary to only a portion of a miRNA, e.g., to a portion less than 1, 2, 3, or 4 nucleotides of the full length of a naturally occurring miRNA sequence, or to a portion less than 1, 2, 3, or 4 nucleotides shorter than a naturally occurring miRNA sequence. Full or complete complementarity (e.g., full complementarity or complete complementarity over all or a significant portion of the length of a naturally occurring miRNA) is preferred when the desired regulation is mRNA degradation. In some embodiments, a miRNA binding site includes a sequence that has complementarity (e.g., partial or complete complementarity) with a miRNA seed sequence. In some embodiments, the miRNA binding site includes a sequence that has complete complementarity with a miRNA seed sequence. In some embodiments, a miRNA binding site includes a sequence that has complementarity (e.g., partial or complete complementarity) with a miRNA sequence. In some embodiments, the miRNA binding site includes a sequence that has complete complementarity with a miRNA sequence. In some embodiments, a miRNA binding site has complete complementarity with a miRNA sequence but for 1, 2, or 3 nucleotide substitutions, terminal additions, and/or truncations.

[1295] In some embodiments, the miRNA binding site is the same length as the corresponding miRNA. In other embodiments, the miRNA binding site is one, two, three, four, five, six, seven, eight, nine, ten, eleven or twelve nucleotide(s) shorter than the corresponding miRNA at the 5′ terminus, the 3′ terminus, or both. In still other embodiments, the microRNA binding site is two nucleotides shorter than the corresponding microRNA at the 5′ terminus, the 3′ terminus, or both. The miRNA binding sites that are shorter than the corresponding miRNAs are still capable of degrading the mRNA incorporating one or more of the miRNA binding sites or preventing the mRNA from translation.

[1296] In some embodiments, the miRNA binding site binds the corresponding mature miRNA that is part of an active RISC containing Dicer. In another embodiment, binding of the miRNA binding site to the corresponding miRNA in RISC degrades the mRNA containing the miRNA binding site or prevents the mRNA from being translated. In some embodiments, the miRNA binding site has sufficient complementarity to miRNA so that a RISC complex comprising the miRNA cleaves the polynucleotide comprising the miRNA binding site. In other embodiments, the miRNA binding site has imperfect complementarity so that a RISC complex comprising the miRNA induces instability in the polynucleotide comprising the miRNA binding site. In another embodiment, the miRNA binding site has imperfect complementarity so that a RISC complex comprising the miRNA represses transcription of the polynucleotide comprising the miRNA binding site.

[1297] In some embodiments, the miRNA binding site has one, two, three, four, five, six, seven, eight, nine, ten, eleven, or twelve mismatch(es) from the corresponding miRNA.

[1298] In some embodiments, the miRNA binding site has at least about ten, at least about eleven, at least about twelve, at least about thirteen, at least about fourteen, at least about fifteen, at least about sixteen, at least about seventeen, at least about eighteen, at least about nineteen, at least about twenty, or at least about twenty-one contiguous nucleotides complementary to at least about ten, at least about eleven, at least about twelve, at least about thirteen, at least about fourteen, at least about fifteen, at least about sixteen, at least about seventeen, at least about eighteen, at least about nineteen, at least about twenty, or at least about twenty-one, respectively, contiguous nucleotides of the corresponding miRNA.

[1299] By engineering one or more miRNA binding sites into a polynucleotide of the invention, the polynucleotide can be targeted for degradation or reduced translation, provided the miRNA in question is available. This can reduce off-target effects upon delivery of the polynucleotide. For example, if a polynucleotide of the invention is not intended to be delivered to a tissue or cell but ends up is said tissue or cell, then a miRNA abundant in the tissue or cell can inhibit the expression of the gene of interest if one or multiple binding sites of the miRNA are engineered into the 5′ UTR and/or 3′ UTR of the polynucleotide. Thus, in some embodiments, incorporation of one or more miRNA binding sites into an mRNA of the disclosure may reduce the hazard of off-target effects upon nucleic acid molecule delivery and/or enable tissue-specific regulation of expression of a polypeptide encoded by the mRNA. In yet other embodiments, incorporation of one or more miRNA binding sites into an mRNA of the disclosure can modulate immune responses upon nucleic acid delivery in vivo. In further embodiments, incorporation of one or more miRNA binding sites into an mRNA of the disclosure can modulate accelerated blood clearance (ABC) of lipid-comprising compounds and compositions described herein.

[1300] Conversely, miRNA binding sites can be removed from polynucleotide sequences in which they naturally occur to increase protein expression in specific tissues. For example, a binding site for a specific miRNA can be removed from a polynucleotide to improve protein expression in tissues or cells containing the miRNA.

[1301] Regulation of expression in multiple tissues can be accomplished through introduction or removal of one or more miRNA binding sites, e.g., one or more distinct miRNA binding sites. The decision whether to remove or insert a miRNA binding site can be made based on miRNA expression patterns and/or their profiling in tissues and/or cells in development and/or disease.

[1302] Identification of miRNAs, miRNA binding sites, and their expression patterns and role in biology have been reported (e.g., Bonauer et al., Curr Drug Targets 2010 11:943-949; Anand and Cheresh Curr Opin Hematol 2011 18:171-176; Contreras and Rao Leukemia 2012 26:404-413 (2011 Dec. 20. doi: 10.1038/leu.2011.356); Bartel Cell 2009 136:215-233; Landgraf et al, Cell, 2007 129:1401-1414; Gentner and Naldini, Tissue Antigens. 2012 80:393-403 and all references therein; each of which is incorporated herein by reference in its entirety).

[1303] Examples of tissues where miRNA are known to regulate mRNA, and thereby protein expression, include, but are not limited to, liver (miR-122), muscle (miR-133, miR-206, miR-208), endothelial cells (miR-17-92, miR-126), myeloid cells (miR-142-3p, miR-142-5p, miR-16, miR-21, miR-223, miR-24, miR-27), adipose tissue (let-7, miR-30c), heart (miR-1d, miR-149), kidney (miR-192, miR-194, miR-204), and lung epithelial cells (let-7, miR-133, miR-126). Specifically, miRNAs are known to be differentially expressed in immune cells (also called hematopoietic cells), such as antigen presenting cells (APCs) (e.g., dendritic cells and macrophages), macrophages, monocytes, B lymphocytes, T lymphocytes, granulocytes, natural killer cells, etc. Immune cell specific miRNAs are involved in immunogenicity, autoimmunity, the immune response to infection, inflammation, as well as unwanted immune response after gene therapy and tissue/organ transplantation. Immune cells specific miRNAs also regulate many aspects of development, proliferation, differentiation, and apoptosis of hematopoietic cells (immune cells). For example, miR-142 and miR-146 are exclusively expressed in immune cells, particularly abundant in myeloid dendritic cells. It has been demonstrated that the immune response to a polynucleotide can be shut-off by adding miR-142 binding sites to the 3′-UTR of the polynucleotide, enabling more stable gene transfer in tissues and cells. miR-142 efficiently degrades exogenous polynucleotides in antigen presenting cells and suppresses cytotoxic elimination of transduced cells (e.g., Annoni A et al., blood, 2009, 114, 5152-5161; Brown B D, et al., Nat med. 2006, 12(5), 585-591; Brown B D, et al., blood, 2007, 110(13): 4144-4152, each of which is incorporated herein by reference in its entirety).

[1304] In some embodiments, a polynucleotide of the invention comprises a miRNA binding site, wherein the miRNA binding site comprises one or more nucleotide sequences selected from Table 3C or Table 4A, including one or more copies of any one or more of the miRNA binding site sequences. In some embodiments, a polynucleotide of the invention further comprises at least one, two, three, four, five, six, seven, eight, nine, ten, or more of the same or different miRNA binding sites selected from Table 3C or Table 4A, including any combination thereof.

[1305] In some embodiments, the miRNA binding site binds to miR-142 or is complementary to miR-142. In some embodiments, the miR-142 comprises SEQ ID NO:114. In some embodiments, the miRNA binding site binds to miR-142-3p or miR-142-5p. In some embodiments, the miR-142-3p binding site comprises SEQ ID NO:202. In some embodiments, the miR-142-5p binding site comprises SEQ ID NO:204. In some embodiments, the miRNA binding site comprises a nucleotide sequence at least 80%, at least 85%, at least 90%, at least 95%, or 100% identical to SEQ ID NO:202 or SEQ ID NO:204.

[1306] In some embodiments, the miRNA binding site binds to miR-126 or is complementary to miR-126. In some embodiments, the miR-126 comprises SEQ ID NO: 205. In some embodiments, the miRNA binding site binds to miR-126-3p or miR-126-5p. In some embodiments, the miR-126-3p binding site comprises SEQ ID NO: 207. In some embodiments, the miR-126-5p binding site comprises SEQ ID NO: 209. In some embodiments, the miRNA binding site comprises a nucleotide sequence at least 80%, at least 85%, at least 90%, at least 95%, or 100% identical to SEQ ID NO: 121 or SEQ ID NO: 123.

[1307] In one embodiment, the 3′ UTR comprises two miRNA binding sites, wherein a first miRNA binding site binds to miR-142 and a second miRNA binding site binds to miR-126. In a specific embodiment, the 3′ UTR binding to miR-142 and miR-126 comprises, consists, or consists essentially of the sequence of SEQ ID NO: 249.

TABLE 3C
miR-142, miR-126, and miR-142 and miR-126
binding sites

| SEQ | | |
|---|---|---|
| ID | | |
| NO. | Description | Sequence |
| 200 | miR-142 | GACAGUGCAGUCACCCAUAAAGUAGAAAGCA |
| | | CUACUAACAGCACUGGAGGGUGUAGUGUUUC |
| | | CUACUUUAUGGAUGAGUGUACUGUG |
| 201 | miR-142-3p | UGUAGUGUUUCCUACUUUAUGGA |
| 202 | miR-142-3p | UCCAUAAAGUAGGAAACACUACA |
| | binding site | |
| 203 | miR-142-5p | CAUAAAGUAGAAAGCACUACU |
| 204 | miR-142-5p | AGUAGUGCUUUCUACUUUAUG |
| | binding site | |
| 205 | miR-126 | CGCUGGCGACGGGACAUUAUUACUUUUGGUA |
| | | CGCGCUGUGACACUUCAAACUCGUACCGUGA |
| | | GUAAUAAUGCGCCGUCCACGGCA |
| 206 | miR-126-3p | UCGUACCGUGAGUAAUAAUGCG |
| 207 | miR-126-3p | CGCAUUAUUACUCACGGUACGA |
| | binding site | |
| 208 | miR-126-5p | CAUUAUUACUUUUGGUACGCG |
| 710 | miR-126-5p | CGCGUACCAAAAGUAAUAAUG |
| | binding site | |

[1308] In some embodiments, a miRNA binding site is inserted in the polynucleotide of the invention in any position of the polynucleotide (e.g., the 5′ UTR and/or 3′ UTR). In some embodiments, the 5′ UTR comprises a miRNA binding site. In some embodiments, the 3′ UTR comprises a miRNA binding site. In some embodiments, the 5′ UTR and the 3′ UTR comprise a miRNA binding site. The insertion site in the polynucleotide can be anywhere in the polynucleotide as long as the insertion of the miRNA binding site in the polynucleotide does not interfere with the translation of a functional polypeptide in the absence of the corresponding miRNA; and in the presence of the miRNA, the insertion of the miRNA binding site in the polynucleotide and the binding of the miRNA binding site to the corresponding miRNA are capable of degrading the polynucleotide or preventing the translation of the polynucleotide.

[1309] In some embodiments, a miRNA binding site is inserted in at least about 30 nucleotides downstream from the stop codon of an ORF in a polynucleotide of the invention comprising the ORF. In some embodiments, a miRNA binding site is inserted in at least about 10 nucleotides, at least about 15 nucleotides, at least about 20 nucleotides, at least about 25 nucleotides, at least about 30 nucleotides, at least about 35 nucleotides, at least about 40 nucleotides, at least about 45 nucleotides, at least about 50 nucleotides, at least about 55 nucleotides, at least about 60 nucleotides, at least about 65 nucleotides, at least about 70 nucleotides, at least about 75 nucleotides, at least about 80 nucleotides, at least about 85 nucleotides, at least about 90 nucleotides, at least about 95 nucleotides, or at least about 100 nucleotides downstream from the stop codon of an ORF in a polynucleotide of the invention. In some embodiments, a miRNA binding site is inserted in about 10 nucleotides to about 100 nucleotides, about 20 nucleotides to about 90 nucleotides, about 30 nucleotides to about 80 nucleotides, about 40 nucleotides to about 70 nucleotides, about 50 nucleotides to about 60 nucleotides, about 45 nucleotides to about 65 nucleotides downstream from the stop codon of an ORF in a polynucleotide of the invention. In some embodiments, a miRNA binding site is inserted within the 3′ UTR immediately following the stop codon of the coding region within the polynucleotide of the invention, e.g., mRNA. In some embodiments, if there are multiple copies of a stop codon in the construct, a miRNA binding site is inserted immediately following the final stop codon. In some embodiments, a miRNA binding site is inserted further downstream of the stop codon, in which case there are 3′ UTR bases between the stop codon and the miR binding site(s). In some embodiments, three non-limiting examples of possible insertion sites for a miR in a 3′ UTR are shown in SEQ ID NOs: 248, 249, and 250, which show a 3′ UTR sequence with a miR-142-3p site inserted in one of three different possible insertion sites, respectively, within the 3′ UTR. In some embodiments, one or more miRNA binding sites can be positioned within the 5′ UTR at one or more possible insertion sites. For example, three non-limiting examples of possible insertion sites for a miR in a 5′ UTR are shown in SEQ ID NOs: 251, 252, or 253, which show a 5′ UTR sequence with a miR-142-3p site inserted into one of three different possible insertion sites, respectively, within the 5′ UTR.

[1310] In one embodiment, a codon optimized open reading frame encoding a polypeptide of interest comprises a stop codon and the at least one microRNA binding site is located within the 3′ UTR 1-100 nucleotides after the stop codon. In one embodiment, the codon optimized open reading frame encoding the polypeptide of interest comprises a stop codon and the at least one microRNA binding site for a miR expressed in immune cells is located within the 3′ UTR 30-50 nucleotides after the stop codon. In another embodiment, the codon optimized open reading frame encoding the polypeptide of interest comprises a stop codon and the at least one microRNA binding site for a miR expressed in immune cells is located within the 3′ UTR at least 50 nucleotides after the stop codon. In other embodiments, the codon optimized open reading frame encoding the polypeptide of interest comprises a stop codon and the at least one microRNA binding site for a miR expressed in immune cells is located within the 3′ UTR immediately after the stop codon, or within the 3′ UTR 15-20 nucleotides after the stop codon or within the 3′ UTR 70-80 nucleotides after the stop codon. In other embodiments, the 3′ UTR comprises more than one miRNA binding site (e.g., 2-4 miRNA binding sites), wherein there can be a spacer region (e.g., of 10-100, 20-70 or 30-50 nucleotides in length) between each miRNA binding site. In another embodiment, the 3′ UTR comprises a spacer region between the end of the miRNA binding site(s) and the poly A tail nucleotides. For example, a spacer region of 10-100, 20-70 or 30-50 nucleotides in length can be situated between the end of the miRNA binding site(s) and the beginning of the poly A tail.

[1311] In one embodiment, a codon optimized open reading frame encoding a polypeptide of interest comprises a start codon and the at least one microRNA binding site is located within the 5′ UTR 1-100 nucleotides before (upstream of) the start codon. In one embodiment, the codon optimized open reading frame encoding the polypeptide of interest comprises a start codon and the at least one microRNA binding site for a miR expressed in immune cells is located within the 5′ UTR 10-50 nucleotides before (upstream of) the start codon. In another embodiment, the codon optimized open reading frame encoding the polypeptide of interest comprises a start codon and the at least one microRNA binding site for a miR expressed in immune cells is located within the 5′ UTR at least 25 nucleotides before (upstream of) the start codon. In other embodiments, the codon optimized open reading frame encoding the polypeptide of interest comprises a start codon and the at least one microRNA binding site for a miR expressed in immune cells is located within the 5′ UTR immediately before the start codon, or within the 5′ UTR 15-20 nucleotides before the start codon or within the 5′ UTR 70-80 nucleotides before the start codon. In other embodiments, the 5′ UTR comprises more than one miRNA binding site (e.g., 2-4 miRNA binding sites), wherein there can be a spacer region (e.g., of 10-100, 20-70 or 30-50 nucleotides in length) between each miRNA binding site.

[1312] In one embodiment, the 3′ UTR comprises more than one stop codon, wherein at least one miRNA binding site is positioned downstream of the stop codons. For example, a 3′ UTR can comprise 1, 2 or 3 stop codons. Non-limiting examples of triple stop codons that can be used include: UGAUAAUAG, UGAUAGUAA, UAAUGAUAG, UGAUAAUAA, UGAUAGUAG, UAAUGAUGA, UAAUAGUAG, UGAUGAUGA, UAAUAAUAA, and UAGUAGUAG. Within a 3′ UTR, for example, 1, 2, 3 or 4 miRNA binding sites, e.g., miR-142-3p binding sites, can be positioned immediately adjacent to the stop codon(s) or at any number of nucleotides downstream of the final stop codon. When the 3′ UTR comprises multiple miRNA binding sites, these binding sites can be positioned directly next to each other in the construct (i.e., one after the other) or, alternatively, spacer nucleotides can be positioned between each binding site.

[1313] In one embodiment, the 3′ UTR comprises three stop codons with a single miR-142-3p binding site located downstream of the 3rd stop codon. Non-limiting examples of sequences of 3′ UTR having three stop codons and a single miR-142-3p binding site located at different positions downstream of the final stop codon are shown in SEQ TD NOs: 237, 248, 249, and 250.

TABLE 4A
5′ UTRs, 3′UTRs, miR sequences, and miR binding sites

| SEQ ID NO: | Sequence |
|---|---|
| 220 | GCUGGAGCCUCGGUGGCCAUGCUUCUUGCCCCUUGGGCCUCCCCCCAGCCCC |
| | UCCUCCCCUUCCUGCACCCGUACCCCCUCCAUAAAGUAGGAAACACUACAGU |
| | GGUCUUUGAAUAAAGUCUGAGUGGGCGGC |
| | (3′ UTR with miR 142-3p binding site) |
| 202 | UCCAUAAAGUAGGAAACACUACA |
| | (miR 142-3p binding site) |
| 201 | UGUAGUGUUUCCUACUUUAUGGA |
| | (miR 142-3p sequence) |
| 203 | CAUAAAGUAGAAAGCACUACU |
| | (miR 142-5p sequence) |
| 221 | CCUCUGAAAUUCAGUUCUUCAG |
| | (miR 146-3p sequence) |
| 222 | UGAGAACUGAAUUCCAUGGGUU |
| | (miR 146-5p sequence) |
| 223 | CUCCUACAUAUUAGCAUUAACA |
| | (miR 155-3p sequence) |
| 224 | UUAAUGCUAAUCGUGAUAGGGGU |
| | (miR 155-5p sequence) |
| 206 | UCGUACCGUGAGUAAUAAUGCG |
| | (miR 126-3p sequence) |
| 208 | CAUUAUUACUUUUGGUACGCG |
| | (miR 126-5p sequence) |
| 225 | CCAGUAUUAACUGUGCUGCUGA |
| | (miR 16-3p sequence) |
| 226 | UAGCAGCACGUAAAUAUUGGCG |
| | (miR 16-5p sequence) |
| 227 | CAACACCAGUCGAUGGGCUGU |
| | (miR 21-3p sequence) |
| 228 | UAGCUUAUCAGACUGAUGUUGA |
| | (miR 21-5p sequence) |
| 143 | UGUCAGUUUGUCAAAUACCCCA |
| | (miR 223-3p sequence) |
| 230 | CGUGUAUUUGACAAGCUGAGUU |
| | (miR 223-5p sequence) |
| 231 | UGGCUCAGUUCAGCAGGAACAG |
| | (miR 24-3p sequence) |
| 232 | UGCCUACUGAGCUGAUAUCAGU |
| | (miR 24-5p sequence) |
| 233 | UUCACAGUGGCUAAGUUCCGC |
| | (miR 27-3p sequence) |
| 234 | AGGGCUUAGCUGCUUGUGAGCA |
| | (miR 27-5p sequence) |
| 207 | CGCAUUAUUACUCACGGUACGA |
| | (miR 126-3p binding site) |
| 235 | UGAUAAUAGGCUGGAGCCUCGGUGGCCAUGCUUCUUGCCCCUUGGGCCUCCC |
| | CCCAGCCCCUCCUCCCCUUCCUGCACCCGUACCCCC [symbol] |
| | [symbol] GUGGUCUUUGAAUAAAGUCUGAGUGGGCGGC |
| | (3′ UTR with miR 126-3p binding site) |
| 236 | UGAUAAUAGGCUGGAGCCUCGGUGGCCAUGCUUCUUGCCCCUUGGGCCUCCC |
| | CCCAGCCCCUCCUCCCCUUCCUGCACCCGUACCCCCGUGGUCUUUGAAUAAA |
| | GUCUGAGUGGGCGGC |
| | (3′ UTR, no miR binding sites) |
| 237 | UGAUAAUAGGCUGGAGCCUCGGUGGCCAUGCUUCUUGCCCCUUGGGCCUCCC |
| | CCCAGCCCCUCCUCCCCUUCCUGCACCCGUACCCCCUCCAUAAAGUAGGAAA |
| | CACUACAGUGGUCUUUGAAUAAAGUCUGAGUGGGCGGC |
| | (3′ UTR with miR 142-3p binding site) |
| 199 | UGAUAAUAGUCCAUAAAGUAGGAAACACUACAGCUGGAGCCUCGGUGGCCAU |
| | GCUUCUUGCCCCUUGGGCCUCCCCCCAGCCCCUCCUCCCCUUCCUGCACCCG |
| | UACCCCC [symbol] GUGGUCUUUGAAUAAAGUCUGAG |
| | UGGGCGGC |
| | (3′ UTR with miR 142-3p and miR 126-3p binding sites |
| | variant 1) |
| 239 | UUAAUGCUAAUUGUGAUAGGGGU |
| | (miR 155-5p sequence) |
| 240 | ACCCCUAUCACAAUUAGCAUUAA |
| | (miR 155-5p binding site) |
| 241 | UGAUAAUAGUCCAUAAAGUAGGAAACACUACAGCUGGAGCCUCGGUGGCCAU |
| | GCUUCUUGCCCCUUGGGCCUCCAUAAAGUAGGAAACACUACAUCCCCCCAGC |
| | CCCUCCUCCCCUUCCUGCACCCGUACCCCCUCCAUAAAGUAGGAAACACUAC |
| | AGUGGUCUUUGAAUAAAGUCUGAGUGGGCGGC |
| | (3′ UTR with 3 miR 142-3p binding sites) |
| 242 | UGAUAAUAGGCUGGAGCCUCGGUGGCCAUGCUUCUUGCCCCUUGGGCCUCCC |
| | CCCAGCCCCUCCUCCCCUUCCUGCACCCGUACCCCC [symbol] |
| | [symbol] GUGGUCUUUGAAUAAAGUCUGAGUGGGCGGC |
| | (3′ UTR with miR 142-5p binding site) |
| 243 | UGAUAAUAG [symbol] GCUGGAGCCUCGGUGGCCAUGC |
| | UUCUUGCCCCUUGGGCC [symbol] UCCCCCCAGCCCCU |
| | CCUCCCCUUCCUGCACCCGUACCCCC [symbol] GUGGU |
| | CUUUGAAUAAAGUCUGAGUGGGCGGC |
| | (3′ UTR with 3 miR 142-5p binding sites) |
| 244 | UGAUAAUAG [symbol] GCUGGAGCCUCGGUGGCCAUGC |
| | UUCUUGCCCCUUGGGCCUCCAUAAAGUAGGAAACACUACAUCCCCCCAGCCC |
| | CUCCUCCCCUUCCUGCACCCGUACCCCC [symbol] GUG |
| | GUCUUUGAAUAAAGUCUGAGUGGGCGGC |
| | (3′ UTR with 2 miR 142-5p binding sites and 1 miR |
| | 142-3p binding site) |
| 245 | UGAUAAUAGGCUGGAGCCUCGGUGGCCAUGCUUCUUGCCCCUUGGGCCUCCC |
| | CCCAGCCCCUCCUCCCCUUCCUGCACCCGUACCCCCACCCCUAUCACAAUUA |
| | GCAUUAAGUGGUCUUUGAAUAAAGUCUGAGUGGGCGGC |
| | (3′ UTR with miR 155-5p binding site) |
| 246 | UGAUAAUAGACCCCUAUCACAAUUAGCAUUAAGCUGGAGCCUCGGUGGCCAU |
| | GCUUCUUGCCCCUUGGGCCACCCCUAUCACAAUUAGCAUUAAUCCCCCCAGC |
| | CCCUCCUCCCCUUCCUGCACCCGUACCCCCACCCCUAUCACAAUUAGCAUUA |
| | AGUGGUCUUUGAAUAAAGUCUGAGUGGGCGGC |
| | (3′ UTR with 3 miR 155-5p binding sites) |
| 247 | UGAUAAUAGACCCCUAUCACAAUUAGCAUUAAGCUGGAGCCUCGGUGGCCAU |
| | GCUUCUUGCCCCUUGGGCCUCCAUAAAGUAGGAAACACUACAUCCCCCCAGC |
| | CCCUCCUCCCCUUCCUGCACCCGUACCCCCACCCCUAUCACAAUUAGCAUUA |
| | AGUGGUCUUUGAAUAAAGUCUGAGUGGGCGGC |
| | (3′ UTR with 2 miR 155-5p binding sites and 1 miR |
| | 142-3p binding site) |
| 248 | UGAUAAUAGUCCAUAAAGUAGGAAACACUACAGCUGGAGCCUCGGUGGCCAU |
| | GCUUCUUGCCCCUUGGGCCUCCCCCCAGCCCCUCCUCCCCUUCCUGCACCCG |
| | UACCCCCGUGGUCUUUGAAUAAAGUCUGAGUGGGGGC |
| | (3′ UTR with miR 142-3p binding site, P1 insertion) |
| 249 | UGAUAAUAGGCUGGAGCCUCGGUGGCUCCAUAAAGUAGGAAACACUACACAU |
| | GCUUCUUGCCCCUUGGGCCUCCCCCCAGCCCCUCCUCCCCUUCCUGCACCCG |
| | UACCCCCGUGGUCUUUGAAUAAAGUCUGAGUGGGCGGC |
| | (3′ UTR with miR 142-3p binding site, P2 insertion) |
| 250 | UGAUAAUAGGCUGGAGCCUCGGUGGCCAUGCUUCUUGCCCCUUGGGCCUCCA |
| | UAAAGUAGGAAACACUACAUCCCCCCAGCCCCUCCUCCCCUUCCUGCACCCG |
| | UACCCCCGUGGUCUUUGAAUAAAGUCUGAGUGGGCGGC |
| | (3′ UTR with miR 142-3p binding site, P3 insertion) |
| 204 | AGUAGUGCUUUCUACUUUAUG |
| | (miR-142-5p binding site) |
| 200 | GACAGUGCAGUCACCCAUAAAGUAGAAAGCACUACUAACAGCACUGGAGGGU |
| | GUAGUGUUUCCUACUUUAUGGAUGAGUGUACUGUG |
| | (miR-142) |
| 708 | GGGAAAUAAGAGAGAAAAGAAGAGUAAGAAGAAAUAUAAGAGCCACC |
| | (5′ UTR) |
| 251 | GGGAAAUAAGAGUCCAUAAAGUAGGAAACACUACAAGAAAAGAAGAGUAAGA |
| | AGAAAUAUAAGAGCCACC |
| | (5′ UTR with miR142-3p binding site at position p1) |
| 252 | GGGAAAUAAGAGAGAAAAGAAGAGUAAUCCAUAAAGUAGGAAACACUACAGA |
| | AGAAAUAUAAGAGCCACC |
| | (5′ UTR with miR142-3p binding site at position p2) |
| 253 | GGGAAAUAAGAGAGAAAAGAAGAGUAAGAAGAAAUAUAAUCCAUAAAGUAGG |
| | AAACACUACAGAGCCACC |
| | (5′ UTR with miR142-3p binding site at position p3) |
| 254 | ACCCCUAUCACAAUUAGCAUUAA |
| | (miR 155-5p binding site) |
| 255 | UGAUAAUAG [symbol] GCUGGAGCCUCGGUGGCCAUGC |
| | UUCUUGCCCCUUGGGCC [symbol] UCCCCCCAGCCCCU |
| | CUCCCCUUCCUGCACCCGUACCCCC [symbol] GUGGUC |
| | UUUGAAUAAAGUCUGAGUGGGCGGC |
| | (3′ UTR with 3 miR 142-5p binding sites) |
| 256 | UGAUAAUAGGCUGGAGCCUCGGUGGCCAUGCUUCUUGCCCCUUCCAUAAAGU |
| | AGGAAACACUACAUGGGCCUCCCCCCAGCCCCUCCUCCCCUUCCUGCACCCG |
| | UACCCCCGUGGUCUUUGAAUAAAGUCUGAGUGGGCGGC |
| | (3′UTR including miR142-3p binding site) |
| 257 | UGAUAAUAGGCUGGAGCCUCGGUGGCCAUGCUUCUUGCCCCUUGGGCCUCCC |
| | CCCAGUCCAUAAAGUAGGAAACACUACACCCCUCCUCCCCUUCCUGCACCCG |
| | UACCCCCGUGGUCUUUGAAUAAAGUCUGAGUGGGCGGC |
| | (3′UTR including miR142-3p binding site) |
| 258 | UGAUAAUAGGCUGGAGCCUCGGUGGCCAUGCUUCUUGCCCCUUGGGCCUCCC |
| | CCCAGCCCCUCCUCCCCUUCUCCAUAAAGUAGGAAACACUACACUGCACCCG |
| | UACCCCCGUGGUCUUUGAAUAAAGUCUGAGUGGGCGGC |
| | (3′UTR including miR142-3p binding site) |
| 259 | UGAUAAUAGGCUGGAGCCUCGGUGGCCAUGCUUCUUGCCCCUUGGGCCUCCC |
| | CCCAGCCCCUCCUCCCCUUCCUGCACCCGUACCCCCGUGGUCUUUGAAUAAA |
| | GUUCCAUAAAGUAGGAAACACUACACUGAGUGGGCGGC |
| | (3′UTR including miR142-3p binding site) |
| 260 | UGAUAAUAGUCCAUAAAGUAGGAAACACUACAGCUGGAGCCUCGGUGGCCUA |
| | GCUUCUUGCCCCUUGGGCCUCCCCCCAGCCCCUCCUCCCCUUCCUGCACCCG |
| | UACCCCC [symbol] GUGGUCUUUGAAUAAAGUCUGAG |
| | UGGGCGGC |
| | (3′ UTR with miR 142-3p and miR 126-3p binding sites |
| | variant 2) |
| 261 | UGAUAAUAGGCUGGAGCCUCGGUGGCCUAGCUUCUUGCCCCUUGGGCCUCCC |
| | CCCAGCCCCUCCUCCCCUUCCUGCACCCGUACCCCCGUGGUCUUUGAAUAAA |
| | GUCUGAGUGGGCGGC |
| | (3′ UTR, no miR binding sites variant 2) |
| 111 | UGAUAAUAGGCUGGAGCCUCGGUGGCCUAGCUUCUUGCCCCUUGGGCCUCCC |
| | CCCAGCCCCUCCUCCCCUUCCUGCACCCGUACCCCCUCCAUAAAGUAGGAAA |
| | CACUACAGUGGUCUUUGAAUAAAGUCUGAGUGGGCGGC |
| | (3′ UTR with miR 142-3p binding site variant 3) |
| 262 | UGAUAAUAGGCUGGAGCCUCGGUGGCCUAGCUUCUUGCCCCUUGGGCCUCCC |
| | CCCAGCCCCUCCUCCCCUUCCUGCACCCGUACCCCC [symbol] |
| | [symbol] GUGGUCUUUGAAUAAAGUCUGAGUGGGCGGC |
| | (3′ UTR with miR 126-3p binding site variant 3) |
| 263 | UGAUAAUAGUCCAUAAAGUAGGAAACACUACAGCUGGAGCCUCGGUGGCCUA |
| | GCUUCUUGCCCCUUGGGCCUCCAUAAAGUAGGAAACACUACAUCCCCCCAGC |
| | CCCUCCUCCCCUUCCUGCACCCGUACCCCCUCCAUAAAGUAGGAAACACUAC |
| | AGUGGUCUUUGAAUAAAGUCUGAGUGGGCGGC |
| | (3′ UTR with 3 miR 142-3p binding sites variant 2) |
| 264 | UGAUAAUAGUCCAUAAAGUAGGAAACACUACAGCUGGAGCCUCGGUGGCCUA |
| | GCUUCUUGCCCCUUGGGCCUCCCCCCAGCCCCUCCUCCCCUUCCUGCACCCG |
| | UACCCCCGUGGUCUUUGAAUAAAGUCUGAGUGGGCGGC |
| | (3′UTR with miR 142-3p binding site, P1 insertion |
| | variant 2) |
| 265 | UGAUAAUAGGCUGGAGCCUCGGUGGCUCCAUAAAGUAGGAAACACUACACUA |
| | GCUUCUUGCCCCUUGGGCCUCCCCCCAGCCCCUCCUCCCCUUCCUGCACCCG |
| | UACCCCCGUGGUCUUUGAAUAAAGUCUGAGUGGGCGGC |
| | (3′UTR with miR 142-3p binding site, P2 insertion |
| | variant 2) |
| 266 | UGAUAAUAGGCUGGAGCCUCGGUGGCCUAGCUUCUUGCCCCUUGGGCCUCCA |
| | UAAAGUAGGAAACACUACAUCCCCCCAGCCCCUCCUCCCCUUCCUGCACCCG |
| | UACCCCCGUGGUCUUUGAAUAAAGUCUGAGUGGGCGGC |
| | (3′UTR with miR 142-3p binding site, P3 insertion |
| | variant 2) |
| 267 | UGAUAAUAGGCUGGAGCCUCGGUGGCCUAGCUUCUUGCCCCUUGGGCCUCCC |
| | CCCAGCCCCUCCUCCCCUUCCUGCACCCGUACCCCCACCCCUAUCACAAUUA |
| | GCAUUAAGUGGUCUUUGAAUAAAGUCUGAGUGGGCGGC |
| | (3′UTR with miR 155-5p binding site variant 2) |
| 268 | UGAUAAUAGACCCCUAUCACAAUUAGCAUUAAGCUGGAGCCUCGGUGGCCUA |
| | GCUUCUUGCCCCUUGGGCCACCCCUAUCACAAUUAGCAUUAAUCCCCCCAGC |
| | CCCUCCUCCCCUUCCUGCACCCGUACCCCCACCCCUAUCACAAUUAGCAUUA |
| | AGUGGUCUUUGAAUAAAGUCUGAGUGGGCGGC |
| | (3′ UTR with 3 miR 155-5p binding sites variant 2) |
| 269 | UGAUAAUAGACCCCUAUCACAAUUAGCAUUAAGCUGGAGCCUCGGUGGCCUA |
| | GCUUCUUGCCCCUUGGGCCUCCAUAAAGUAGGAAACACUACAUCCCCCCAGC |
| | CCCUCCUCCCCUUCCUGCACCCGUACCCCCACCCCUAUCACAAUUAGCAUUA |
| | AGUGGUCUUUGAAUAAAGUCUGAGUGGGCGGC |
| | (3'UTR with 2 miR 155-5p binding sites and 1 miR |
| | 142-3p binding site variant 2) |
| 271 | AGGAAAUAAGAGAGAAAAGAAGAGUAAGAAGAAAUAUAAGAGCCACC |
| | 5′ -UTR (v1 plus A-start) |
| 272 | GGGAAAUAAGAGAGAAAAGAAGAGUAAGAAGAAAUAUAAGACCCCGGCGCCG |
| | CCACC |
| | (5′ UTR v1.1 plus G-start) |
| 273 | AGGAAAUAAGAGAGAAAAGAAGAGUAAGAAGAAAUAUAAGACCCCGGCGCCG |
| | CCACC |
| | (5′ UTR v1.1 plus A-start) |
| 274 | GGGAGAUCAGAGAGAAAAGAAGAGUAAGAAGAAAUAUAAGAGCCACC |
| | 5′ UTR 002 (upstream UTR plus G-start) |
| 80 | GGGAGACAAGCUUGGCAUUCCGGUACUGUUGGUAAAGCCACC |
| | 5′ UTR-004 (Upstream UTR plus G-start) |
| 81 | GGGAAUUAACAGAGAAAAGAAGAGUAAGAAGAAAUAUAAGAGCCACC |
| | 5′ UTR-008 (Upstream UTR plus G-start) |
| 82 | GGGAAAUUAGACAGAAAAGAAGAGUAAGAAGAAAUAUAAGAGCCACC |
| | 5′ UTR-009 (Upstream UTR plus G-start) |
| 83 | GGGAAAUAAGAGAGUAAAGAACAGUAAGAAGAAAUAUAAGAGCCACC |
| | 5′ UTR-010, (Upstream UTR plus G-start) |
| 84 | GGGAAAAAAGAGAGAAAAGAAGACUAAGAAGAAAUAUAAGAGCCACC |
| | 5′ UTR-011 (Upstream UTR plus G-start) |
| 85 | GGGAAAUAAGAGAGAAAAGAAGAGUAAGAAGAUAUAUAAGAGCCACC |
| | 5′ UTR-012 (Upstream UTR plus G-start) |
| 86 | GGGAAAUAAGAGACAAAACAAGAGUAAGAAGAAAUAUAAGAGCCACC |
| | 5′ UTR-013 (Upstream UTR plus G-start) |
| 87 | GGGAAAUUAGAGAGUAAAGAACAGUAAGUAGAAUUAAAAGAGCCACC |
| | 5′ UTR-014 (Upstream UTR plus G-start) |
| 88 | GGGAAAUAAGAGAGAAUAGAAGAGUAAGAAGAAAUAUAAGAGCCACC |
| | 5′ UTR-015 (Upstream UTR plus G-start) |
| 89 | GGGAAAUAAGAGAGAAAAGAAGAGUAAGAAGAAAAUUAAGAGCCACC |
| | 5′ UTR-016 (Upstream UTR plus G-start) |
| 90 | GGGAAAUAAGAGAGAAAAGAAGAGUAAGAAGAAAUUUAAGAGCCACC |
| | 5′ UTR-017 (Upstream UTR plus G-start) |
| 91 | UCAAGCUUUUGGACCCUCGUACAGAAGCUAAUACGACUCACUAUAGGGAAAU |
| | AAGAGAGAAAAGAAGAGUAAGAAGAAAUAUAAGAGCCACC |
| | 5′ UTR-018 (Upstream UTR) |

Stop codon = bold
miR 142-3p binding site = underline
miR 126-3p binding site = bold underline
miR 155-5p binding site = italicized
miR 142-5p binding site = italicized and bold underline

[1314] In one embodiment, the polynucleotide of the invention comprises a 5′ UTR, a codon optimized open reading frame encoding a polypeptide of interest, a 3′ UTR comprising the at least one miRNA binding site for a miR expressed in immune cells, and a 3′ tailing region of linked nucleosides. In various embodiments, the 3′ UTR comprises 1-4, at least two, one, two, three or four miRNA binding sites for miRs expressed in immune cells, preferably abundantly or preferentially expressed in immune cells.

[1315] In one embodiment, the at least one miRNA expressed in immune cells is a miR-142-3p microRNA binding site. In one embodiment, the miR-142-3p microRNA binding site comprises the sequence shown in SEQ ID NO: 202. In one embodiment, the 3′ UTR of the mRNA comprising the miR-142-3p microRNA binding site comprises the sequence shown in SEQ ID NO: 220.

[1316] In one embodiment, the at least one miRNA expressed in immune cells is a miR-126 microRNA binding site. In one embodiment, the miR-126 binding site is a miR-126-3p binding site. In one embodiment, the miR-126-3p microRNA binding site comprises the sequence shown in SEQ ID NO: 207. In one embodiment, the 3′ UTR of the mRNA of the invention comprising the miR-126-3p microRNA binding site comprises the sequence shown in SEQ ID NO: 235.

[1317] Non-limiting exemplary sequences for miRs to which a microRNA binding site(s) of the disclosure can bind include the following: miR-142-3p (SEQ ID NO: 201), miR-142-5p (SEQ ID NO: 203), miR-146-3p (SEQ ID NO: 221), miR-146-5p (SEQ ID NO: 222), miR-155-3p (SEQ ID NO: 223), miR-155-5p (SEQ ID NO: 224), miR-126-3p (SEQ ID NO: 206), miR-126-5p (SEQ ID NO: 208), miR-16-3p (SEQ ID NO: 225), miR-16-5p (SEQ ID NO: 226), miR-21-3p (SEQ ID NO: 227), miR-21-5p (SEQ ID NO: 228), miR-223-3p (SEQ ID NO: 143), miR-223-5p (SEQ ID NO: 230), miR-24-3p (SEQ ID NO: 231), miR-24-5p (SEQ ID NO: 232), miR-27-3p (SEQ ID NO: 233) and miR-27-5p (SEQ ID NO: 234). Other suitable miR sequences expressed in immune cells (e.g., abundantly or preferentially expressed in immune cells) are known and available in the art, for example at the University of Manchester's microRNA database, miRBase. Sites that bind any of the aforementioned miRs can be designed based on Watson-Crick complementarity to the miR, typically 100% complementarity to the miR, and inserted into an mRNA construct of the disclosure as described herein.

[1318] In another embodiment, a polynucleotide of the present invention (e.g., and mRNA, e.g., the 3′ UTR thereof) can comprise at least one miRNA binding site to thereby reduce or inhibit accelerated blood clearance, for example by reducing or inhibiting production of IgMs, e.g., against PEG, by B cells and/or reducing or inhibiting proliferation and/or activation of pDCs, and can comprise at least one miRNA binding site for modulating tissue expression of an encoded protein of interest.

[1319] miRNA gene regulation can be influenced by the sequence surrounding the miRNA such as, but not limited to, the species of the surrounding sequence, the type of sequence (e.g., heterologous, homologous, exogenous, endogenous, or artificial), regulatory elements in the surrounding sequence and/or structural elements in the surrounding sequence. The miRNA can be influenced by the 5′UTR and/or 3′UTR. As a non-limiting example, a non-human 3′UTR can increase the regulatory effect of the miRNA sequence on the expression of a polypeptide of interest compared to a human 3′ UTR of the same sequence type.

[1320] In one embodiment, other regulatory elements and/or structural elements of the 5′ UTR can influence miRNA mediated gene regulation. One example of a regulatory element and/or structural element is a structured IRES (Internal Ribosome Entry Site) in the 5′ UTR, which is necessary for the binding of translational elongation factors to initiate protein translation. EIF4A2 binding to this secondarily structured element in the 5′-UTR is necessary for miRNA mediated gene expression (Meijer H A et al., Science, 2013, 340, 82-85, herein incorporated by reference in its entirety). The polynucleotides of the invention can further include this structured 5′ UTR to enhance microRNA mediated gene regulation.

[1321] At least one miRNA binding site can be engineered into the 3′ UTR of a polynucleotide of the invention. In this context, at least two, at least three, at least four, at least five, at least six, at least seven, at least eight, at least nine, at least ten, or more miRNA binding sites can be engineered into a 3′ UTR of a polynucleotide of the invention. For example, 1 to 10, 1 to 9, 1 to 8, 1 to 7, 1 to 6, 1 to 5, 1 to 4, 1 to 3, 2, or 1 miRNA binding sites can be engineered into the 3′UTR of a polynucleotide of the invention. In one embodiment, miRNA binding sites incorporated into a polynucleotide of the invention can be the same or can be different miRNA sites. A combination of different miRNA binding sites incorporated into a polynucleotide of the invention can include combinations in which more than one copy of any of the different miRNA sites are incorporated. In another embodiment, miRNA binding sites incorporated into a polynucleotide of the invention can target the same or different tissues in the body. As a non-limiting example, through the introduction of tissue-, cell-type-, or disease-specific miRNA binding sites in the 3′-UTR of a polynucleotide of the invention, the degree of expression in specific cell types (e.g., myeloid cells, endothelial cells, etc.) can be reduced.

[1322] In one embodiment, a miRNA binding site can be engineered near the 5′ terminus of the 3′UTR, about halfway between the 5′ terminus and 3′ terminus of the 3′UTR and/or near the 3′ terminus of the 3′ UTR in a polynucleotide of the invention. As a non-limiting example, a miRNA binding site can be engineered near the 5′ terminus of the 3′UTR and about halfway between the 5′ terminus and 3′ terminus of the 3′UTR. As another non-limiting example, a miRNA binding site can be engineered near the 3′ terminus of the 3′UTR and about halfway between the 5′ terminus and 3′ terminus of the 3′ UTR. In another non-limiting example, a miRNA binding site can be engineered near the 5′ terminus of the 3′ UTR and near the 3′ terminus of the 3′ UTR.

[1323] In another embodiment, a 3′UTR can comprise 1, 2, 3, 4, 5, 6, 7, 8, 9, or 10 miRNA binding sites. The miRNA binding sites can be complementary to a miRNA, miRNA seed sequence, and/or miRNA sequences flanking the seed sequence.

[1324] In some embodiments, the expression of a polynucleotide of the invention can be controlled by incorporating at least one sensor sequence in the polynucleotide and formulating the polynucleotide for administration. As a non-limiting example, a polynucleotide of the invention can be targeted to a tissue or cell by incorporating a miRNA binding site and formulating the polynucleotide in a lipid nanoparticle comprising a ionizable lipid, including any of the lipids described herein.

[1325] A polynucleotide of the invention can be engineered for more targeted expression in specific tissues, cell types, or biological conditions based on the expression patterns of miRNAs in the different tissues, cell types, or biological conditions. Through introduction of tissue-specific miRNA binding sites, a polynucleotide of the invention can be designed for optimal protein expression in a tissue or cell, or in the context of a biological condition.

[1326] In some embodiments, a polynucleotide of the invention can be designed to incorporate miRNA binding sites that either have 100% identity to known miRNA seed sequences or have less than 100% identity to miRNA seed sequences. In some embodiments, a polynucleotide of the invention can be designed to incorporate miRNA binding sites that have at least: 60%, 65%, 70%, 75%, 80%, 85%, 90%, 95%, 96%, 97%, 98%, or 99% identity to known miRNA seed sequences. The miRNA seed sequence can be partially mutated to decrease miRNA binding affinity and as such result in reduced downmodulation of the polynucleotide. In essence, the degree of match or mis-match between the miRNA binding site and the miRNA seed can act as a rheostat to more finely tune the ability of the miRNA to modulate protein expression. In addition, mutation in the non-seed region of a miRNA binding site can also impact the ability of a miRNA to modulate protein expression.

[1327] In one embodiment, a miRNA sequence can be incorporated into the loop of a stem loop.

[1328] In another embodiment, a miRNA seed sequence can be incorporated in the loop of a stem loop and a miRNA binding site can be incorporated into the 5′ or 3′ stem of the stem loop.

[1329] In one embodiment the miRNA sequence in the 5′ UTR can be used to stabilize a polynucleotide of the invention described herein.

[1330] In another embodiment, a miRNA sequence in the 5′ UTR of a polynucleotide of the invention can be used to decrease the accessibility of the site of translation initiation such as, but not limited to a start codon. See, e.g., Matsuda et al., PLoS One. 2010 11(5):e15057; incorporated herein by reference in its entirety, which used antisense locked nucleic acid (LNA) oligonucleotides and exon-junction complexes (EJCs) around a start codon (−4 to +37 where the A of the AUG codons is +1) to decrease the accessibility to the first start codon (AUG). Matsuda showed that altering the sequence around the start codon with an LNA or EJC affected the efficiency, length and structural stability of a polynucleotide. A polynucleotide of the invention can comprise a miRNA sequence, instead of the LNA or EJC sequence described by Matsuda et al, near the site of translation initiation to decrease the accessibility to the site of translation initiation. The site of translation initiation can be prior to, after or within the miRNA sequence. As a non-limiting example, the site of translation initiation can be located within a miRNA sequence such as a seed sequence or binding site.

[1331] In some embodiments, a polynucleotide of the invention can include at least one miRNA to dampen the antigen presentation by antigen presenting cells. The miRNA can be the complete miRNA sequence, the miRNA seed sequence, the miRNA sequence without the seed, or a combination thereof. As a non-limiting example, a miRNA incorporated into a polynucleotide of the invention can be specific to the hematopoietic system. As another non-limiting example, a miRNA incorporated into a polynucleotide of the invention to dampen antigen presentation is miR-142-3p.

[1332] In some embodiments, a polynucleotide of the invention can include at least one miRNA to dampen expression of the encoded polypeptide in a tissue or cell of interest. As a non-limiting example, a polynucleotide of the invention can include at least one miR-142-3p binding site, miR-142-3p seed sequence, miR-142-3p binding site without the seed, miR-142-5p binding site, miR-142-5p seed sequence, miR-142-5p binding site without the seed, miR-146 binding site, miR-146 seed sequence and/or miR-146 binding site without the seed sequence.

[1333] In some embodiments, a polynucleotide of the invention can comprise at least one miRNA binding site in the 3′UTR to selectively degrade mRNA therapeutics in the immune cells to subdue unwanted immunogenic reactions caused by therapeutic delivery. As a non-limiting example, the miRNA binding site can make a polynucleotide of the invention more unstable in antigen presenting cells. Non-limiting examples of these miRNAs include miR-142-5p, miR-142-3p, miR-146a-5p, and miR-146-3p.

[1334] In one embodiment, a polynucleotide of the invention comprises at least one miRNA sequence in a region of the polynucleotide that can interact with a RNA binding protein.

[1335] In some embodiments, the polynucleotide of the invention (e.g., a RNA, e.g., an mRNA) comprising (i) a sequence-optimized nucleotide sequence (e.g., an ORF) encoding a metabolic reprograming molecule polypeptide (e.g., the wild-type sequence, functional fragment, or variant thereof) and (ii) a miRNA binding site (e.g., a miRNA binding site that binds to miR-142) and/or a miRNA binding site that binds to miR-126.

### IVT Polynucleotide Architecture

[1336] In some embodiments, the polynucleotide of the present disclosure comprising an mRNA encoding a metabolic reprogramming molecule polypeptide is an IVT polynucleotide.

[1337] Traditionally, the basic components of an mRNA molecule include at least a coding region, a 5′UTR, a 3′UTR, a 5′ cap and a poly-A tail. The IVT polynucleotides of the present disclosure can function as mRNA but are distinguished from wild-type mRNA in their functional and/or structural design features which serve, e.g., to overcome existing problems of effective polypeptide production using nucleic-acid based therapeutics.

[1338] The primary construct of an IVT polynucleotide comprises a first region of linked nucleotides that is flanked by a first flanking region and a second flaking region. This first region can include, but is not limited to, the encoded metabolic reprogramming molecule polypeptide. The first flanking region can include a sequence of linked nucleosides which function as a 5′ untranslated region (UTR) such as the 5′ UTR of any of the nucleic acids encoding the native 5′ UTR of the polypeptide or a non-native 5′UTR such as, but not limited to, a heterologous 5′ UTR or a synthetic 5′ UTR. The IVT encoding a metabolic reprogramming molecule polypeptide can comprise at its 5 terminus a signal sequence region encoding one or more signal sequences. The flanking region can comprise a region of linked nucleotides comprising one or more complete or incomplete 5′ UTRs sequences. The flanking region can also comprise a 5′ terminal cap. The second flanking region can comprise a region of linked nucleotides comprising one or more complete or incomplete 3′ UTRs which can encode the native 3′ UTR of a metabolic reprogramming molecule or a non-native 3′ UTR such as, but not limited to, a heterologous 3′ UTR or a synthetic 3′ UTR. The flanking region can also comprise a 3′ tailing sequence. The 3′ tailing sequence can be, but is not limited to, a polyA tail, a polyA-G quartet and/or a stem loop sequence.

[1339] Additional and exemplary features of IVT polynucleotide architecture are disclosed in International PCT application WO 2017/201325, filed on 18 May 2017, the entire contents of which are hereby incorporated by reference.

### 5′UTR and 3′ UTR

[1340] A UTR can be homologous or heterologous to the coding region in a polynucleotide. In some embodiments, the UTR is homologous to the ORF encoding the metabolic reprogramming molecule polypeptide. In some embodiments, the UTR is heterologous to the ORF encoding the IDO polypeptide. In some embodiments, the UTR is heterologous to the ORF encoding the TDO polypeptide.

[1341] In some embodiments, the polynucleotide comprises two or more 5′ UTRs or functional fragments thereof, each of which has the same or different nucleotide sequences. In some embodiments, the polynucleotide comprises two or more 3′ UTRs or functional fragments thereof, each of which has the same or different nucleotide sequences.

[1342] In some embodiments, the 5′ UTR or functional fragment thereof, 3′ UTR or functional fragment thereof, or any combination thereof is sequence optimized.

[1343] In some embodiments, the 5′UTR or functional fragment thereof, 3′ UTR or functional fragment thereof, or any combination thereof comprises at least one chemically modified nucleobase, e.g., N1-methylpseudouracil or 5-methoxyuracil.

[1344] UTRs can have features that provide a regulatory role, e.g., increased or decreased stability, localization and/or translation efficiency. A polynucleotide comprising a UTR can be administered to a cell, tissue, or organism, and one or more regulatory features can be measured using routine methods. In some embodiments, a functional fragment of a 5′ UTR or 3′ UTR comprises one or more regulatory features of a full length 5′ or 3′ UTR, respectively.

[1345] Natural 5′UTRs bear features that play roles in translation initiation. They harbor signatures like Kozak sequences that are commonly known to be involved in the process by which the ribosome initiates translation of many genes. Kozak sequences have the consensus CCR(A/G)CCAUGG, where R is a purine (adenine or guanine) three bases upstream of the start codon (AUG), which is followed by another ‘G’. 5′ UTRs also have been known to form secondary structures that are involved in elongation factor binding.

[1346] By engineering the features typically found in abundantly expressed genes of specific target organs, one can enhance the stability and protein production of a polynucleotide. For example, introduction of 5′ UTR of liver-expressed mRNA, such as albumin, serum amyloid A, Apolipoprotein A/B/E, transferrin, alpha fetoprotein, erythropoietin, or Factor VIII, can enhance expression of polynucleotides in hepatic cell lines or liver. Likewise, use of 5′UTR from other tissue-specific mRNA to improve expression in that tissue is possible for muscle (e.g., MyoD, Myosin, Myoglobin, Myogenin, Herculin), for endothelial cells (e.g., Tie-1, CD36), for myeloid cells (e.g., C/EBP, AML1, G-CSF, GM-CSF, CD11b, MSR, Fr-1, i-NOS), for leukocytes (e.g., CD45, CD18), for adipose tissue (e.g., CD36, GLUT4, ACRP30, adiponectin) and for lung epithelial cells (e.g., SP-A/B/C/D).

[1347] In some embodiments, UTRs are selected from a family of transcripts whose proteins share a common function, structure, feature or property. For example, an encoded polypeptide can belong to a family of proteins (i.e., that share at least one function, structure, feature, localization, origin, or expression pattern), which are expressed in a particular cell, tissue or at some time during development. The UTRs from any of the genes or mRNA can be swapped for any other UTR of the same or different family of proteins to create a new polynucleotide.

[1348] In some embodiments, the 5′ UTR and the 3′ UTR can be heterologous. In some embodiments, the 5′ UTR can be derived from a different species than the 3′ UTR. In some embodiments, the 3′ UTR can be derived from a different species than the 5′ UTR.

[1349] Co-owned International Patent Application No. PCT/US2014/021522 (Publ. No. WO/2014/164253, incorporated herein by reference in its entirety) provides a listing of exemplary UTRs that can be utilized in the polynucleotide of the present invention as flanking regions to an ORF.

[1350] Additional exemplary UTRs of the application include, but are not limited to, one or more 5′UTR and/or 3′UTR derived from the nucleic acid sequence of: a globin, such as an a- or P-globin (e.g., a Xenopus, mouse, rabbit, or human globin); a strong Kozak translational initiation signal; a CYBA (e.g., human cytochrome b-245 a polypeptide); an albumin (e.g., human albumin7); a HSD17B4 (hydroxysteroid (17-p) dehydrogenase); a virus (e.g., a tobacco etch virus (TEV), a Venezuelan equine encephalitis virus (VEEV), a Dengue virus, a cytomegalovirus (CMV) (e.g., CMV immediate early 1 (IE1)), a hepatitis virus (e.g., hepatitis B virus), a sindbis virus, or a PAV barley yellow dwarf virus); a heat shock protein (e.g., hsp70); a translation initiation factor (e.g., elF4G); a glucose transporter (e.g., hGLUT1 (human glucose transporter 1)); an actin (e.g., human α or β actin); a GAPDH; a tubulin; a histone; a citric acid cycle enzyme; a topoisomerase (e.g., a 5′UTR of a TOP gene lacking the 5′ TOP motif (the oligopyrimidine tract)); a ribosomal protein Large 32 (L32); a ribosomal protein (e.g., human or mouse ribosomal protein, such as, for example, rps9); an ATP synthase (e.g., ATP5A1 or the R subunit of mitochondrial H⁺-ATP synthase); a growth hormone e (e.g., bovine (bGH) or human (hGH)); an elongation factor (e.g., elongation factor 1 al (EEF1A1)); a manganese superoxide dismutase (MnSOD); a myocyte enhancer factor 2A (MEF2A); a 3-F1-ATPase, a creatine kinase, a myoglobin, a granulocyte-colony stimulating factor (G-CSF); a collagen (e.g., collagen type I, alpha 2 (CollA2), collagen type I, alpha 1 (CollA1), collagen type VI, alpha 2 (Col6A2), collagen type VI, alpha 1 (Col6A1)); a ribophorin (e.g., ribophorin I (RPNI)); a low density lipoprotein receptor-related protein (e.g., LRP1); a cardiotrophin-like cytokine factor (e.g., Nnt1); calreticulin (Calr); a procollagen-lysine, 2-oxoglutarate 5-dioxygenase 1 (Plod1); and a nucleobindin (e.g., Nucb1).

[1351] In some embodiments, the 5′ UTR is selected from the group consisting of a P-globin 5′ UTR; a 5′UTR containing a strong Kozak translational initiation signal; a cytochrome b-245 a polypeptide (CYBA) 5′ UTR; a hydroxysteroid (17-p) dehydrogenase (HSD17B4) 5′ UTR; a Tobacco etch virus (TEV) 5′ UTR; a Venezuelan equine encephalitis virus (TEEV) 5′ UTR; a 5′ proximal open reading frame of rubella virus (RV) RNA encoding nonstructural proteins; a Dengue virus (DEN) 5′ UTR; a heat shock protein 70 (Hsp70) 5′ UTR; a eIF4G 5′ UTR; a GLUT1 5′ UTR; functional fragments thereof and any combination thereof.

[1352] In some embodiments, the 3′ UTR is selected from the group consisting of a P-globin 3′ UTR; a CYBA 3′ UTR; an albumin 3′ UTR; a growth hormone (GH) 3′ UTR; a VEEV 3′ UTR; a hepatitis B virus (HBV) 3′ UTR; a-globin 3′UTR; a DEN 3′ UTR; a PAV barley yellow dwarf virus (BYDV-PAV) 3′ UTR; an elongation factor 1 al (EEF1A1) 3′ UTR; a manganese superoxide dismutase (MnSOD) 3′ UTR; a R subunit of mitochondrial H(+)-ATP synthase ((3-mRNA) 3′ UTR; a GLUT1 3′ UTR; a MEF2A 3′ UTR; a P-F1-ATPase 3′ UTR; functional fragments thereof and combinations thereof.

[1353] Wild-type UTRs derived from any gene or mRNA can be incorporated into the polynucleotides of the invention. In some embodiments, a UTR can be altered relative to a wild type or native UTR to produce a variant UTR, e.g., by changing the orientation or location of the UTR relative to the ORF; or by inclusion of additional nucleotides, deletion of nucleotides, swapping or transposition of nucleotides. In some embodiments, variants of 5′ or 3′ UTRs can be utilized, for example, mutants of wild type UTRs, or variants wherein one or more nucleotides are added to or removed from a terminus of the UTR.

[1354] Additionally, one or more synthetic UTRs can be used in combination with one or more non-synthetic UTRs. See, e.g., Mandal and Rossi, Nat. Protoc. 2013 8(3):568-82, the contents of which are incorporated herein by reference in their entirety.

[1355] UTRs or portions thereof can be placed in the same orientation as in the transcript from which they were selected or can be altered in orientation or location. Hence, a 5′ and/or 3′ UTR can be inverted, shortened, lengthened, or combined with one or more other 5′ UTRs or 3′ UTRs. In some embodiments, the polynucleotide comprises multiple UTRs, e.g., a double, a triple or a quadruple 5′ UTR or 3′ UTR. For example, a double UTR comprises two copies of the same UTR either in series or substantially in series. For example, a double beta-globin 3′UTR can be used (see US2010/0129877, the contents of which are incorporated herein by reference in its entirety).

[1356] In certain embodiments, the 5′ UTR and/or 3′ UTR sequence of the invention comprises a nucleotide sequence at least about 60%, at least about 70%, at least about 80%, at least about 90%, at least about 95%, at least about 96%, at least about 97%, at least about 98%, at least about 99%, or about 100% identical to a sequence selected from the group consisting of 5′ UTR sequences comprising any of the 5′ UTR or 3′ UTR sequences disclosed herein (e.g., in Table A or Table B), and any combination thereof.

[1357] The polynucleotides of the invention can comprise combinations of features. For example, the ORF can be flanked by a 5′ UTR that comprises a strong Kozak translational initiation signal and/or a 3′ UTR comprising an oligo(dT) sequence for templated addition of a poly-A tail. A 5′ UTR can comprise a first polynucleotide fragment and a second polynucleotide fragment from the same and/or different UTRs (see, e.g., US2010/0293625, herein incorporated by reference in its entirety).

[1358] Other non-UTR sequences can be used as regions or subregions within the polynucleotides of the invention. For example, introns or portions of intron sequences can be incorporated into the polynucleotides of the invention. Incorporation of intronic sequences can increase protein production as well as polynucleotide expression levels. In some embodiments, the polynucleotide of the invention comprises an internal ribosome entry site (IRES) instead of or in addition to a UTR (see, e.g., Yakubov et al., Biochem. Biophys. Res. Commun. 2010 394(1):189-193, the contents of which are incorporated herein by reference in their entirety). In some embodiments, the polynucleotide comprises an IRES instead of a 5′ UTR sequence. In some embodiments, the polynucleotide comprises an ORF and a viral capsid sequence. In some embodiments, the polynucleotide comprises a synthetic 5′ UTR in combination with a non-synthetic 3′ UTR.

[1359] In some embodiments, the UTR can also include at least one translation enhancer polynucleotide, translation enhancer element, or translational enhancer elements (collectively, “TEE,” which refers to nucleic acid sequences that increase the amount of polypeptide or protein produced from a polynucleotide. As a non-limiting example, the TEE can be located between the transcription promoter and the start codon. In some embodiments, the 5′ UTR comprises a TEE. In one aspect, a TEE is a conserved element in a UTR that can promote translational activity of a nucleic acid such as, but not limited to, cap-dependent or cap-independent translation.

### a. 5′ UTR Sequences

[1360] 5′ UTR sequences are important for ribosome recruitment to the mRNA and have been reported to play a role in translation (Hinnebusch A, et al., (2016) Science, 352:6292: 1413-6).

[1361] Disclosed herein, inter alia, is a polynucleotide, e.g., mRNA, comprising an open reading frame encoding a metabolic reprogramming molecule polypeptide (e.g., as described herein) encoding a polypeptide, wherein the polynucleotide has a 5′ UTR that confers an increased half-life, increased expression and/or increased activity of the polypeptide encoded by said polynucleotide, or of the polynucleotide itself. In an embodiment, a polynucleotide disclosed herein comprises: (a) a 5′-UTR (e.g., as provided in Table A or a variant or fragment thereof); (b) a coding region comprising a stop element (e.g., as described herein); and (c) a 3′-UTR (e.g., as described herein), and LNP compositions comprising the same. In an embodiment, the polynucleotide comprises a 5′-UTR comprising a sequence provided in Table A or a variant or fragment thereof (e.g., a functional variant or fragment thereof).

[1362] In an embodiment, the polynucleotide having a 5′ UTR sequence provided in Table A or a variant or fragment thereof, has an increase in the half-life of the polynucleotide, e.g., about 1.5-20-fold increase in half-life of the polynucleotide. In an embodiment, the increase in half-life is about 1.5, 2, 3, 4, 5, 6, 7, 8, 9, 10, 11, 12, 13, 14, 15, 16, 17, 18, 19, or 20-fold, or more. In an embodiment, the increase in half life is about 1.5-fold or more. In an embodiment, the increase in half life is about 2-fold or more. In an embodiment, the increase in half life is about 3-fold or more. In an embodiment, the increase in half life is about 4-fold or more. In an embodiment, the increase in half life is about 5-fold or more.

[1363] In an embodiment, the polynucleotide having a 5′ UTR sequence provided in Table A or a variant or fragment thereof, results in an increased level and/or activity, e.g., output, of the polypeptide encoded by the polynucleotide. In an embodiment, the 5′ UTR results in about 1.5-20-fold increase in level and/or activity, e.g., output, of the polypeptide encoded by the polynucleotide. In an embodiment, the increase in level and/or activity is about 1.5, 2, 3, 4, 5, 6, 7, 8, 9, 10, 11, 12, 13, 14, 15, 16, 17, 18, 19, or 20-fold, or more. In an embodiment, the increase in level and/or activity is about 1.5-fold or more. In an embodiment, the increase in level and/or activity is about 2-fold or more. In an embodiment, the increase in level and/or activity is about 3-fold or more. In an embodiment, the increase in level and/or activity is about 4-fold or more. In an embodiment, the increase in level and/or activity is about 5-fold or more.

[1364] In an embodiment, the increase is compared to an otherwise similar polynucleotide which does not have a 5′ UTR, has a different 5′ UTR, or does not have a 5′ UTR described in Table A or a variant or fragment thereof.

[1365] In an embodiment, the increase in half-life of the polynucleotide is measured according to an assay that measures the half-life of a polynucleotide, e.g., an assay described herein.

[1366] In an embodiment, the increase in level and/or activity, e.g., output, of the polypeptide encoded by the polynucleotide is measured according to an assay that measures the level and/or activity of a polypeptide, e.g., an assay described herein.

[1367] In an embodiment, the 5′ UTR comprises a sequence provided in Table A or a sequence with at least 80%, 85%, 90%, 95%, 96%, 97%, 98%, 99% or 100% identity to a 5′ UTR sequence provided in Table A, or a variant or a fragment thereof. In an embodiment, the 5′ UTR comprises a sequence with at least 80%, 85%, 90%, 95%, 96%, 97%, 98%, 99% or 100% identity to SEQ ID NO: 50, SEQ ID NO: 51, SEQ ID NO: 52, SEQ ID NO: 53, SEQ ID NO: 54, SEQ ID NO: 55, SEQ ID NO: 56, SEQ ID NO: 57, SEQ ID NO: 58, SEQ ID NO: 60, SEQ ID NO: 61, SEQ ID NO: 62, SEQ ID NO: 63, SEQ ID NO: 64, SEQ ID NO: 65, SEQ ID NO: 66, SEQ ID NO: 67, SEQ ID NO: 68, SEQ ID NO: 69, SEQ ID NO: 70, SEQ ID NO: 71, SEQ ID NO: 72, SEQ ID NO: 73, SEQ ID NO: 74, SEQ ID NO: 75, SEQ ID NO: 76, SEQ ID NO: 77, SEQ ID NO: 78, SEQ ID NO: 79, or SEQ ID NO: 80.

[1368] In an embodiment, the 5′ UTR comprises a sequence with at least 80%, 85%, 90%, 95%, 96%, 97%, 98%, 99%, or 100% identity to SEQ ID NO: 50. In an embodiment, the 5′ UTR comprises a sequence with at least 80%, 85%, 90%, 95%, 96%, 97%, 98%, 99%, or 100% identity to SEQ ID NO: 51. In an embodiment, the 5′ UTR comprises a sequence with at least 80%, 85%, 90%, 95%, 96%, 97%, 98%, 99%, or 100% identity to SEQ ID NO: 52. In an embodiment, the 5′ UTR comprises a sequence with at least 80%, 85%, 90%, 95%, 96%, 97%, 98%, 99%, or 100% identity to SEQ ID NO: 53. In an embodiment, the 5′ UTR comprises a sequence with at least 80%, 85%, 90%, 95%, 96%, 97%, 98%, 99%, or 100% identity to SEQ ID NO: 54. In an embodiment, the 5′ UTR comprises a sequence with at least 80%, 85%, 90%, 95%, 96%, 97%, 98%, 99%, or 100% identity to SEQ ID NO: 55. In an embodiment, the 5′ UTR comprises a sequence with at least 80%, 85%, 90%, 95%, 96%, 97%, 98%, 99%, or 100% identity to SEQ ID NO: 56. In an embodiment, the 5′ UTR comprises a sequence with at least 80%, 85%, 90%, 95%, 96%, 97%, 98%, 99%, or 100% identity to SEQ ID NO: 57. In an embodiment, the 5′ UTR comprises a sequence with at least 80%, 85%, 90%, 95%, 96%, 97%, 98%, 99%, or 100% identity to SEQ ID NO: 58. In an embodiment, the 5′ UTR comprises a sequence with at least 80%, 85%, 90%, 95%, 96%, 97%, 98%, 99%, or 100% identity to SEQ ID NO: 59. In an embodiment, the 5′ UTR comprises a sequence with at least 80%, 85%, 90%, 95%, 96%, 97%, 98%, 99%, or 100% identity to SEQ ID NO: 60. In an embodiment, the 5′ UTR comprises a sequence with at least 80%, 85%, 90%, 95%, 96%, 97%, 98%, 99%, or 100% identity to SEQ ID NO: 61. In an embodiment, the 5′ UTR comprises a sequence with at least 80%, 85%, 90%, 95%, 96%, 97%, 98%, 99%, or 100% identity to SEQ ID NO: 62. In an embodiment, the 5′ UTR comprises a sequence with at least 80%, 85%, 90%, 95%, 96%, 97%, 98%, 99%, or 100% identity to SEQ ID NO: 63. In an embodiment, the 5′ UTR comprises a sequence with at least 80%, 85%, 90%, 95%, 96%, 97%, 98%, 99%, or 100% identity to SEQ ID NO: 64. In an embodiment, the 5′ UTR comprises a sequence with at least 80%, 85%, 90%, 95%, 96%, 97%, 98%, 99%, or 100% identity to SEQ ID NO: 65. In an embodiment, the 5′ UTR comprises a sequence with at least 80%, 85%, 90%, 95%, 96%, 97%, 98%, 99%, or 100% identity to SEQ ID NO: 66. In an embodiment, the 5′ UTR comprises a sequence with at least 80%, 85%, 90%, 95%, 96%, 97%, 98%, 99%, or 100% identity to SEQ ID NO: 67. In an embodiment, the 5′ UTR comprises a sequence with at least 80%, 85%, 90%, 95%, 96%, 97%, 98%, 99%, or 100% identity to SEQ ID NO: 68. In an embodiment, the 5′ UTR comprises a sequence with at least 80%, 85%, 90%, 95%, 96%, 97%, 98%, 99%, or 100% identity to SEQ ID NO: 69. In an embodiment, the 5′ UTR comprises a sequence with at least 80%, 85%, 90%, 95%, 96%, 97%, 98%, 99%, or 100% identity to SEQ ID NO: 70. In an embodiment, the 5′ UTR comprises a sequence with at least 80%, 85%, 90%, 95%, 96%, 97%, 98%, 99%, or 100% identity to SEQ ID NO: 71. In an embodiment, the 5′ UTR comprises a sequence with at least 80%, 85%, 90%, 95%, 96%, 97%, 98%, 99%, or 100% identity to SEQ ID NO: 72. In an embodiment, the 5′ UTR comprises a sequence with at least 80%, 85%, 90%, 95%, 96%, 97%, 98%, 99%, or 100% identity to SEQ ID NO: 73. In an embodiment, the 5′ UTR comprises a sequence with at least 80%, 85%, 90%, 95%, 96%, 97%, 98%, 99%, or 100% identity to SEQ ID NO: 74. In an embodiment, the 5′ UTR comprises a sequence with at least 80%, 85%, 90%, 95%, 96%, 97%, 98%, 99%, or 100% identity to SEQ ID NO: 75. In an embodiment, the 5′ UTR comprises a sequence with at least 80%, 85%, 90%, 95%, 96%, 97%, 98%, 99%, or 100% identity to SEQ TD NO: 76. In an embodiment, the 5′ UTR comprises a sequence with at least 80%, 85%, 90%, 95, 96%, 97%, 98%, 99%, or 100% identity to SEQ ID NO: 77. In an embodiment, the 5′ UTR comprises a sequence with at least 80%, 85%, 90%, 95%, 96%, 97%, 98%, 99%, or 100% identity to SEQ ID NO: 78. In an embodiment, the 5′ UTR comprises a sequence with at least 80%, 85%, 90%, 95%, 96%, 97%, 98%, 99%, 100% identity to SEQ ID NO: 79. In an embodiment, the 5′ UTR comprises a sequence with at least 80%, 85%, 90%, 95%, 96%, 97%, 98%, 99%, or 100% identity to SEQ ID NO: 80.

[1369] In an embodiment, a 5′ UTR sequence provided in Table A has a first nucleotide which is an A. In an embodiment, a 5′ UTR sequence provided in Table A has a first nucleotide which is a G.

TABLE 3A
5′ UTR sequences

| SEQ ID | Sequence | |
|---|---|---|
| NO: | Name | Sequence |
| 50 | A1 | GGAAAUCGCAAAAUUUGCUCUUCGCGUUAGAUUUCUUUUAGU |
| | | UUUCUCGCAACUAGCAAGCUUUUUGUUCUCGCC |
| 51 | A5 | GGAAAUCCCCACAACCGCCUCAUAUCCAGGCUCAAGAAUAGA |
| | | GCUCAGUGUUUUGUUGUUUAAUCAUUCCGACGUGUUUUGCGA |
| | | UAUUCGCGCAAAGCAGCCAGUCGCGCGCUUGCUUUUAAGUAG |
| | | AGUUGUUUUUCCACCCGUUUGCCAGGCAUCUUUAAUUUAACA |
| | | UAUUUUUAUUUUUCAGGCUAACCUACGCCGCCACC |
| 52 | A6 | GGAAAUAAGAGAGAAAAGAAGAGUAAGAAGAAAUAUAAGAU |
| | | CUCCCUGAGCUUCAGGGAGCCCCGGCGCCGCCACC |
| 53 | A7 | GGAAACCCCCCACCCCCGUAAGAGAGAAAAGAAGAGUAAGAA |
| | | GAAAUAUAAGAUCUCCCUGAGCUUCAGGGAGCCCCGGCGCCG |
| | | CCACC |
| 54 | A8 | GGAGAACUUCCGCUUCCGUUGGCGCAAGCGCUUUCAUUUUUU |
| | | CUGCUACCGUGACUAAG |
| 55 | A9 | GGAAAUAAGAGAGAAAAGAAGAGUAAGAAGAAAUAUAAGAG |
| | | CCACC |
| 56 | A11 | GGAAAUAAGAGAGAAAAGAAGAGUAAGAAGAAAUAUAAGAC |
| | (Reference) | CCCGGCGCCGCCACC |
| 57 | A2 | GGAAAUCGCAAAAUUUGCUCUUCGCGUUAGAUUUCUUUUAGU |
| | | UUUCUCGCAACUAGCAAGCUUUUUGUUCUCGCCGCCGCC |
| 58 | A3 | GGAAAUCGCAAAAUUUUCUUUUCGCGUUAGAUUUCUUUUAGU |
| | | UUUCUUUCAACUAGCAAGCUUUUUGUUCUCGCCGCCGCC |
| 59 | A4 | G G A A A U C G C A A A A (N₂)ₓ(N₃)ₓ C U (N₄)ₓ(N₅)ₓ C G C G U U |
| | | A G A U U U C U U U U A G U U U U C U N₆ N₇ C A A C U A G C A |
| | | A G C U U U U U G U U C U C G C C (N₈ C C)ₓ |
| | | (N₂)ₓ is a uracil and x is an integer from 0 to 5, |
| | | e.g., wherein x = 3 or 4; |
| | | (N₃)ₓ is a guanine and x is an integer from 0 to 1; |
| | | (N₄)ₓ is a cytosine and x is an integer from 0 to 1; |
| | | (N₅)ₓ is a uracil and x is an integer from 0 to 5, |
| | | e.g., wherein x = 2 or 3; |
| | | N₆ is a uracil or cytosine; |
| | | N₇ is a uracil or guanine; |
| | | N₈ is adenine or guanine and x is an integer from 0 to 1. |
| 60 | A27 | GGAAAAUUUUAGCCUGGAACGUUAGAUAACUGUCCUGUUGUC |
| | | UUUAUAUACUUGGUCCCCAAGUAGUUUGUCUUCCAAA |
| 61 | A12 | GGAAACUUUAUUUAGUGUUACUUUAUUUUCUGUUUAUUUGU |
| | | GUUUCUUCAGUGGGUUUGUUCUAAUUUCCUUGGCCGCC |
| 62 | A13 | GGAAAAUCUGUAUUAGGUUGGCGUGUUCUUUGGUCGGUUGU |
| | | UAGUAUUGUUGUUGAUUCGUUUGUGGUCGGUUGCCGCC |
| 63 | A14 | GGAAAAUUAUUAACAUCUUGGUAUUCUCGAUAACCAUUCGUU |
| | | GGAUUUUAUUGUAUUCGUAGUUUGGGUUCCUGCCGCC |
| 64 | A15 | GGAAAUUAUUAUUAUUUCUAGCUACAAUUUAUCAUUGUAUU |
| | | AUUUUAGCUAUUCAUCAUUAUUUACUUGGUGAUCAACA |
| 65 | A16 | GGAAAUAGGUUGUUAACCAAGUUCAAGCCUAAUAAGCUUGGA |
| | | UUCUGGUGACUUGCUUCACCGUUGGCGGGCACCGAUC |
| 66 | A17 | GGAAAUCGUAGAGAGUCGUACUUAGUACAUAUCGACUAUCGG |
| | | UGGACACCAUCAAGAUUAUAAACCAGGCCAGA |
| 67 | A18 | GGAAACCCGCCCAAGCGACCCCAACAUAUCAGCAGUUGCCCA |
| | | AUCCCAACUCCCAACACAAUCCCCAAGCAACGCCGCC |
| 68 | A19 | GGAAAGCGAUUGAAGGCGUCUUUUCAACUACUCGAUUAAGGU |
| | | UGGGUAUCGUCGUGGGACUUGGAAAUUUGUUGUUUCC |
| 69 | A20 | GGAAACUAAUCGAAAUAAAAGAGCCCCGUACUCUUUUAUUUC |
| | | UAUUAGGUUAGGAGCCUUAGCAUUUGUAUCUUAGGUA |
| 70 | A21 | GGAAAUGUGAUUUCCAGCAACUUCUUUUGAAUAUAUUGAAUU |
| | | CCUAAUUCAAAGCGAACAAAUCUACAAGCCAUAUACC |
| 71 | A22 | GGAAAUCGUAGAGAGUCGUACUUACGUGGUCGCCAUUGCAUA |
| | | GCGCGCGAAAGCAACAGGAACAAGAACGCGCC |
| 72 | A23 | GGAAAUCGUAGAGAGUCGUACUUAGAAUAAACAGAGUCGGGU |
| | | CGACUUGUCUCUGAUACUACGACGUCACAAUC |
| 73 | A24 | GGAAAAUUUGCCUUCGGAGUUGCGUAUCCUGAACUGCCCAGC |
| | | CUCCUGAUAUACAACUGUUCCGCUUAUUCGGGCCGCC |
| 74 | A25 | GGAAAUCUGAGCAGGAAUCCUUUGUGCAUUGAAGACUUUAGA |
| | | UUCCUCUCUGCGGUAGACGUGCACUUAUAAGUAUUUG |
| 75 | A26 | GGAAAGCGAUUGAAGGCGUCUUUUCAACUACUCGAUUAAGGU |
| | | UGGGUAUCGUCGUGGGACUUGGAAAUUUGUUGCCACC |
| 76 | A28 | GGAAAUUUUUUUUUGAUAUUAUAAGAGUUUUUUUUUGAUAU |
| | | UAAGAAAAUUUUUUUUUGAUAUUAGAAGAGUAAGAAGAAAU |
| | | AUAAGACCCCGGCGCCGCCACC |
| 77 | A29 | GGAAAUAAGAGAGAAAAGAAGAGUAAGAAGAAAUAUAAGAG |
| | | CCAAAAAAAAAAAACC |
| 78 | A30 | GGAAAUCUCCCUGAGCUUCAGGGAGUAAGAGAGAAAAGAAGA |
| | | GUAAGAAGAAAUAUAAGACCCCGGCGCCGCCACC |
| | A31 | GCCRCC, wherein R = A or G |
| 50 | A32 | GGAAAUCGCAAAAUUUGCUCUUCGCGUUAGAUUUCUUUUAGU |
| | | UUUCUCGCAACUAGCAAGCUUUUUGUUCUCGCC |

[1370] In an embodiment, the 5′ UTR comprises a variant of SEQ ID NO: 50. In an embodiment, the variant of SEQ ID NO: 50 comprises a nucleic acid sequence of Formula A: G G A A A U C G C A A A A (N2)X (N3)X C U (N4)X (N5)X C G C G U U A G A U U U C U U U U A G U U U U C U N6 N7 C A A C U A G C A A G C U U U U U G U U C U C G C C (N₈ C C)x (SEQ ID NO: 59),
[1371] wherein:
   [1372] (N2)x is a uracil and x is an integer from 0 to 5, e.g., wherein x=3 or 4;
   [1373] (N3)x is a guanine and x is an integer from 0 to 1;
   [1374] (N4)x is a cytosine and x is an integer from 0 to 1;
   [1375] (N5)x is a uracil and x is an integer from 0 to 5, e.g., wherein x=2 or 3;
   [1376] N6 is a uracil or cytosine;
   [1377] N7 is a uracil or guanine;
   [1378] N8 is adenine or guanine and x is an integer from 0 to 1.

[1379] In an embodiment (N2)x is a uracil and x is 0. In an embodiment (N2)x is a uracil and x is 1. In an embodiment (N2)x is a uracil and x is 2. In an embodiment (N2)x is a uracil and x is 3.

[1380] In an embodiment, (N2)x is a uracil and x is 4. In an embodiment (N2)x is a uracil and x is 5.

[1381] In an embodiment, (N3)x is a guanine and x is 0. In an embodiment, (N3)x is a guanine and x is 1.

[1382] In an embodiment, (N4)x is a cytosine and x is 0. In an embodiment, (N4)x is a cytosine and x is 1.

[1383] In an embodiment (N5)x is a uracil and x is 0. In an embodiment (N5)x is a uracil and x is 1. In an embodiment (N5)x is a uracil and x is 2. In an embodiment (N5)x is a uracil and x is 3.

[1384] In an embodiment, (N5)x is a uracil and x is 4. In an embodiment (N5)x is a uracil and x is 5.

[1385] In an embodiment, N6 is a uracil. In an embodiment, N6 is a cytosine.

[1386] In an embodiment, N7 is a uracil. In an embodiment, N7 is a guanine.

[1387] In an embodiment, N8 is an adenine and x is 0. In an embodiment, N8 is an adenine and x is 1.

[1388] In an embodiment, N8 is a guanine and x is 0. In an embodiment, N8 is a guanine and x is 1.

[1389] In an embodiment, the 5′ UTR comprises a variant of SEQ ID NO: 50. In an embodiment, the variant of SEQ ID NO: 50 comprises a sequence with at least 50%, 60%, 70%, 80%, 85%, 90%, 95%, 96%, 97%, 98%, or 99% identity to SEQ ID NO: 50. In an embodiment, the variant of SEQ ID NO: 50 comprises a sequence with at least 50% identity to SEQ ID NO: 50. In an embodiment, the variant of SEQ ID NO: 50 comprises a sequence with at least 60% identity to SEQ ID NO: 50. In an embodiment, the variant of SEQ ID NO: 50 comprises a sequence with at least 70% identity to SEQ ID NO: 50. In an embodiment, the variant of SEQ ID NO: 50 comprises a sequence with at least 80% identity to SEQ ID NO: 50. In an embodiment, the variant of SEQ ID NO: 50 comprises a sequence with at least 90% identity to SEQ ID NO: 50. In an embodiment, the variant of SEQ ID NO: 50 comprises a sequence with at least 95% identity to SEQ ID NO: 50. In an embodiment, the variant of SEQ ID NO: 50 comprises a sequence with at least 96% identity to SEQ ID NO: 50. In an embodiment, the variant of SEQ ID NO: 50 comprises a sequence with at least 97% identity to SEQ ID NO: 50. In an embodiment, the variant of SEQ ID NO: 50 comprises a sequence with at least 98% identity to SEQ ID NO: 50. In an embodiment, the variant of SEQ ID NO: 50A comprises a sequence with at least 99% identity to SEQ ID NO: 50.

[1390] In an embodiment, the variant of SEQ ID NO: 50 comprises a uridine content of at least 5%, 10%, 20%, 30%, 40%, 50%, 60%, 70%, or 80%. In an embodiment, the variant of SEQ ID NO: 50 comprises a uridine content of at least 5%. In an embodiment, the variant of SEQ ID NO: 50 comprises a uridine content of at least 10%. In an embodiment, the variant of SEQ ID NO: 50 comprises a uridine content of at least 20%. In an embodiment, the variant of SEQ ID NO: 50 comprises a uridine content of at least 30%. In an embodiment, the variant of SEQ ID NO: 50 comprises a uridine content of at least 40%. In an embodiment, the variant of SEQ ID NO: 50 comprises a uridine content of at least 50%. In an embodiment, the variant of SEQ ID NO: 50 comprises a uridine content of at least 60%. In an embodiment, the variant of SEQ ID NO: 50 comprises a uridine content of at least 70%. In an embodiment, the variant of SEQ ID NO: 50 comprises a uridine content of at least 80%.

[1391] In an embodiment, the variant of SEQ ID NO: 50 comprises at least 2, 3, 4, 5, 6 or 7 consecutive uridines (e.g., a polyuridine tract). In an embodiment, the polyuridine tract in the variant of SEQ ID NO: 50 comprises at least 1-7, 2-7, 3-7, 4-7, 5-7, 6-7, 1-6, 1-5, 1-4, 1-3, 1-2, 2-6, or 3-5 consecutive uridines. In an embodiment, the polyuridine tract in the variant of SEQ ID NO: 50 comprises 4 consecutive uridines. In an embodiment, the polyuridine tract in the variant of SEQ ID NO: 50 comprises 5 consecutive uridines.

[1392] In an embodiment, the variant of SEQ ID NO: 50 comprises 1, 2, 3, 4, 5, 6, 7, 8, 9, 10, 11, 12, 13, 14, or 15 polyuridine tracts. In an embodiment, the variant of SEQ ID NO: 50 comprises 3 polyuridine tracts. In an embodiment, the variant of SEQ ID NO: 50 comprises 4 polyuridine tracts. In an embodiment, the variant of SEQ ID NO: 50 comprises 5 polyuridine tracts.

[1393] In an embodiment, one or more of the polyuridine tracts are adjacent to a different polyuridine tract. In an embodiment, each of, e.g., all, the polyuridine tracts are adjacent to each other, e.g., all of the polyuridine tracts are contiguous.

[1394] In an embodiment, one or more of the polyuridine tracts are separated by 1, 2, 3, 4, 5, 6, 7, 8, 9, 10, 11, 2, 13, 14, 15, 16, 17, 18, 19, 20, 30, 40, 50, or 60 nucleotides. In an embodiment, each of, e.g., all of, the polyuridine tracts are separated by 1, 2, 3, 4, 5, 6, 7, 8, 9, 10, 11, 2, 13, 14, 15, 16, 17, 18, 19, 20, 30, 40, 50, or 60 nucleotides.

[1395] In an embodiment, a first polyuridine tract and a second polyuridine tract are adjacent to each other.

[1396] In an embodiment, a subsequent, e.g., third, fourth, fifth, sixth, seventh, eighth, ninth, or tenth, polyuridine tract is separated by 1, 2, 3, 4, 5, 6, 7, 8, 9, 10, 11, 2, 13, 14, 15, 16, 17, 18, 19, 20, 30, 40, 50, or 60 nucleotides from the first polyuridine tract, the second polyuridine tract, or any one of the subsequent polyuridine tracts.

[1397] In an embodiment, a first polyuridine tract is separated by 1, 2, 3, 4, 5, 6, 7, 8, 9, 10, 11, 2, 13, 14, 15, 16, 17, 18, 19, 20, 30, 40, 50 or 60 nucleotides from a subsequent polyuridine tract, e.g., a second, third, fourth, fifth, sixth or seventh, eighth, ninth, or tenth polyuridine tract. In an embodiment, one or more of the subsequent polyuridine tracts are adjacent to a different polyuridine tract.

[1398] In an embodiment, the 5′ UTR comprises a Kozak sequence, e.g., a GCCRCC nucleotide sequence wherein R is an adenine or guanine. In an embodiment, the Kozak sequence is disposed at the 3′ end of the 5′ UTR sequence.

[1399] In an aspect, the polynucleotide (e.g., mRNA) comprising an open reading frame encoding a metabolic reprogramming molecule polypeptide and membrane anchoring moiety (e.g., any one of SEQ ID NOs: 2, 3, 24, 5, 7, 9, 11, 13-15, 17, 19, 21, 23, 26, 28, 30, 32, 34, 36, 38, 40, 42, or 300-332) and comprising a 5′ UTR sequence disclosed herein is formulated as an LNP. In an embodiment, the LNP composition comprises: (i) an ionizable lipid, e.g., an amino lipid; (ii) a sterol or other structural lipid; (iii) a non-cationic helper lipid or phospholipid; and (iv) a PEG-lipid.

b. 3′ UTR sequences

[1400] 3′UTR sequences have been shown to influence translation, half-life, and subcellular localization of mRNAs (Mayr C., Cold Spring Harb Persp Biol 2019 Oct. 1; 11(10):a034728).

[1401] Disclosed herein, inter alia, is a polynucleotide, e.g., mRNA, comprising an open reading frame encoding a metabolic reprogramming molecule polypeptide and membrane anchoring moiety (e.g., any one of SEQ ID NOs: 2, 3, 24, 5, 7, 9, 11, 13-15, 17, 19, 21, 23, 26, 28, 30, 32, 34, 36, 38, 40, 42, or 300-332), which polynucleotide has a 3′ UTR that confers an increased half-life, increased expression and/or increased activity of the polypeptide encoded by said polynucleotide, or of the polynucleotide itself. In an embodiment, a polynucleotide disclosed herein comprises: (a) a 5′-UTR (e.g., as described herein); (b) a coding region comprising a stop element (e.g., as described herein); and (c) a 3′-UTR (e.g., as provided in Table B or a variant or fragment thereof), and LNP compositions comprising the same. In an embodiment, the polynucleotide comprises a 3′-UTR comprising a sequence provided in Table B or a variant or fragment thereof.

[1402] In an embodiment, the polynucleotide having a 3′ UTR sequence provided in Table B or a variant or fragment thereof, results in an increased half-life of the polynucleotide, e.g., about 1.5-10-fold increase in half-life of the polynucleotide. In an embodiment, the increase in half-life is about 1.5, 2, 3, 4, 5, 6, 7, 8, 9, or 10-fold, or more. In an embodiment, the increase in half-life is about 1.5-fold or more. In an embodiment, the increase in half-life is about 2-fold or more. In an embodiment, the increase in half-life is about 3-fold or more. In an embodiment, the increase in half-life is about 4-fold or more. In an embodiment, the increase in half-life is about 5-fold or more. In an embodiment, the increase in half-life is about 6-fold or more. In an embodiment, the increase in half-life is about 7-fold or more. In an embodiment, the increase in half-life is about 8-fold. In an embodiment, the increase in half-life is about 9-fold or more. In an embodiment, the increase in half-life is about 10-fold or more.

[1403] In an embodiment, the polynucleotide having a 3′ UTR sequence provided in Table B or a variant or fragment thereof, results in a polynucleotide with a mean half-life score of greater than 10.

[1404] In an embodiment, the polynucleotide having a 3′ UTR sequence provided in Table B or a variant or fragment thereof, results in an increased level and/or activity, e.g., output, of the polypeptide encoded by the polynucleotide.

[1405] In an embodiment, the increase is compared to an otherwise similar polynucleotide which does not have a 3′ UTR, has a different 3′ UTR, or does not have a 3′ UTR of Table B or a variant or fragment thereof.

[1406] In an embodiment, the polynucleotide comprises a 3′ UTR sequence provided in Table B or a sequence with at least 80%, 85%, 90%, 95%, 96%, 97%, 98%, 99% or 100% identity to a 3′ UTR sequence provided in Table B, or a fragment thereof. In an embodiment, the 3′ UTR comprises a sequence with at least 80%, 85%, 90%, 95%, 96%, 97%, 98%, 99% or 100% identity to SEQ ID NO: 100, SEQ ID NO: 101, SEQ ID NO: 102, SEQ ID NO: 103, SEQ ID NO: 104, SEQ ID NO: 105, SEQ ID NO: 106, SEQ ID NO: 107, SEQ ID NO: 108, SEQ ID NO: 109, SEQ ID NO: 110, SEQ ID NO: 111, SEQ ID NO: 112, SEQ ID NO: 113, SEQ ID NO: 114, SEQ ID NO:115, SEQ ID NO:136, SEQ ID NO: 137, SEQ ID NO: 138, SEQ ID NO: 139, SEQ ID NO: 140, or SEQ ID NO: 141.

[1407] In an embodiment, the 3′ UTR comprises the sequence of SEQ ID NO: 100, or a sequence with at least 80%, 85%, 90%, 95%, 96%, 97%, 98%, 99% or 100% identity to SEQ ID NO: 100. In an embodiment, the 3′ UTR comprises the sequence of SEQ ID NO: 101, or a sequence with at least 80%, 85%, 90%, 95%, 96%, 97%, 98%, 99% or 100% identity to SEQ ID NO: 101. In an embodiment, the 3′ UTR comprises the sequence of SEQ ID NO: 102, or a sequence with at least 80%, 85%, 90%, 95%, 96%, 97%, 98%, 99% or 100% identity to SEQ ID NO: 102. In an embodiment, the 3′ UTR comprises the sequence of SEQ ID NO: 103, or a sequence with at least 80%, 85%, 90%, 95%, 96%, 97%, 98%, 99% or 100% identity to SEQ ID NO: 103. In an embodiment, the 3′ UTR comprises the sequence of SEQ ID NO: 104, or a sequence with at least 80%, 85%, 90%, 95%, 96%, 97%, 98%, 99% or 100% identity to SEQ ID NO: 104. In an embodiment, the 3′ UTR comprises the sequence of SEQ ID NO: 105, or a sequence with at least 80%, 85%, 90%, 95%, 96%, 97%, 98%, 99% or 100% identity to SEQ ID NO: 105. In an embodiment, the 3′ UTR comprises the sequence of SEQ ID NO: 106, or a sequence with at least 80%, 85%, 90%, 95%, 96%, 97%, 98%, 99% or 100% identity to SEQ ID NO: 106. In an embodiment, the 3′ UTR comprises the sequence of SEQ ID NO: 107, or a sequence with at least 80%, 85%, 90%, 95%, 96%, 97%, 98%, 99% or 100% identity to SEQ ID NO: 107. In an embodiment, the 3′ UTR comprises the sequence of SEQ ID NO: 108, or a sequence with at least 80%, 85%, 90%, 95%, 96%, 97%, 98%, 99% or 100% identity to SEQ ID NO: 108. In an embodiment, the 3′ UTR comprises the sequence of SEQ ID NO: 109, or a sequence with at least 80%, 85%, 90%, 95%, 96%, 97%, 98%, 99% or 100% identity to SEQ ID NO: 109. In an embodiment, the 3′ UTR comprises the sequence of SEQ ID NO: 110, or a sequence with at least 80%, 85%, 90%, 95%, 96%, 97%, 98%, 99% or 100% identity to SEQ ID NO: 110. In an embodiment, the 3′ UTR comprises the sequence of SEQ ID NO: 111, or a sequence with at least 80%, 85%, 90%, 95%, 96%, 97%, 98%, 99% or 100% identity to SEQ ID NO: 111. In an embodiment, the 3′ UTR comprises the sequence of SEQ ID NO: 112, or a sequence with at least 80%, 85%, 90%, 95%, 96%, 97%, 98%, 99% or 100% identity to SEQ ID NO: 112. In an embodiment, the 3′ UTR comprises the sequence of SEQ ID NO: 113, or a sequence with at least 80%, 85%, 90%, 95%, 96%, 97%, 98%, 99% or 100% identity to SEQ ID NO: 113. In an embodiment, the 3′ UTR comprises the sequence of SEQ ID NO: 114, or a sequence with at least 80%, 85%, 90%, 95%, 96%, 97%, 98%, 99% or 100% identity to SEQ ID NO: 114. In an embodiment, the 3′ UTR comprises the sequence of SEQ ID NO: 115, or a sequence with at least 80%, 85%, 90%, 95%, 96%, 97%, 98%, 99% or 100% identity to SEQ ID NO: 115. In an embodiment, the 3′ UTR comprises the sequence of SEQ ID NO: 136, or a sequence with at least 80%, 85%, 90%, 95%, 96%, 97%, 98%, 99% or 100% identity to SEQ ID NO: 136. In an embodiment, the 3′ UTR comprises the sequence of SEQ ID NO: 137, or a sequence with at least 80%, 85%, 90%, 95%, 96%, 97%, 98%, 99% or 100% identity to SEQ ID NO: 137. In an embodiment, the 3′ UTR comprises the sequence of SEQ ID NO: 138, or a sequence with at least 80%, 85%, 90%, 95%, 96%, 97%, 98%, 99% or 100% identity to SEQ ID NO: 138. In an embodiment, the 3′ UTR comprises the sequence of SEQ ID NO: 139, or a sequence with at least 80%, 85%, 90%, 95%, 96%, 97%, 98%, 99% or 100% identity to SEQ ID NO: 139. In an embodiment, the 3′ UTR comprises the sequence of SEQ ID NO: 140, or a sequence with at least 80%, 85%, 90%, 95%, 96%, 97%, 98%, 99% or 100% identity to SEQ ID NO: 140. In an embodiment, the 3′ UTR comprises the sequence of SEQ ID NO: 141, or a sequence with at least 80%, 85%, 90%, 95%, 96%, 97%, 98%, 99% or 100% identity to SEQ ID NO: 141.

TABLE 3B
3′ UTR sequences

| SEQ ID | Sequence | |
|---|---|---|
| NO | Name | Sequence |
| 100 | B1 | UAAUAGUAAGCUGGAGCCUCCUGAGAGACCUGUGUG |
| | | AACUAUUGAGAAGAUCGGAACAGCUCCUUACUCUGA |
| | | GGAAGUUGGUACCCCCGUGGUCUUUGAAUAAAGUCU |
| | | GAGUGGGCGGC |
| 101 | B3 | UAAUAGUAAGCUGGAGCCUCACUCUCCUCUCCAUCCC |
| | | GUAUCCAGGCUGUGAAUUUUUCAAGGAAUAUAAAGA |
| | | UCGGGAUGUACCCCCGUGGUCUUUGAAUAAAGUCUG |
| | | AGUGGGCGGC |
| 102 | B4 | UGAUAGUAAGCUGGAGCCUCUAGUGACGGCAACAGG |
| | | GCUUGGUUUUUCCUUGUUGUGAAAUCGACAUCUCUG |
| | | AAGACAGGGUACCCCCGUGGUCUUUGAAUAAAGUCU |
| | | GAGUGGGCGGC |
| 103 | B5 | UGAUAGUAAGCUGGAGCCUCCUUCCAUCUAGUCACA |
| | | AAGACUCCUUCGUCCCCAGUUGCCGUCUAGGAUUGG |
| | | GCCUCCCAGUACCCCCGUGGUCUUUGAAUAAAGUCU |
| | | GAGUGGGCGGC |
| 104 | B6 | UGAUAGUAAGCUGGAGCCUCCCAUAACAUGACAUAU |
| | | CUGGAUUUUGUGCUUAGAACCUUAAAUUGGAAGCAU |
| | | UCUUAAUUGUACCCCCGUGGUCUUUGAAUAAAGUCU |
| | | GAGUGGGCGGC |
| 105 | B7 | UAAUAGUAAGCUGGAGCCUCCGGAAAACUAAAAUAG |
| | | AGAUAUUUCAAGAUUUUAUAAUUUUCAAAGACCUUU |
| | | GAAAUAUUGUACCCCCGUGGUCUUUGAAUAAAGUCU |
| | | GAGUGGGCGGC |
| 106 | B8 | UAAUAGUAAGCUGGAGCCUCUACACAUUGCUUCUAG |
| | | UUGGCAGAAAUAAUUGAUUAAAAGACCAGAAACUGU |
| | | GAUAACUGGUACCCCCGUGGUCUUUAAAUAAAGUCU |
| | | AAGUGGGCGGC |
| 107 | B9 | UGAUAAUAGGCUGGAGCCUCGGUGGCCAUGCUUCUU |
| | | GCCCCUUGGGCCUCCCCCCAGCCCCUCCUCCCCUUCC |
| | | UGCACCCGUACCCCCGUGGUCUUUGAAUAAAGUCUG |
| | | AGUGGGGGC |
| 108 | B10 | UGAUAAUAGGCUGGAGCCUCGGUGGCCUAGCUUCUU |
| | | GCCCCUUGGGCCUCCCCCCAGCCCCUCCUCCCCUUCC |
| | | UGCACCCGUACCCCCGUGGUCUUUGAAUAAAGUCUG |
| | | AGUGGGGGGC |
| 109 | B11 | UGAUAAUAGGCUGGAGCCUCGGUGGCCAUGCUUCUU |
| | | GCCCCUUGGGCCUCCCCCCAGCCCCUCCUCCCCUUCC |
| | | UGCACCCGUACCCCCCAAACACCAUUGUCACACUCCA |
| | | GUGGUCUUUGAAUAAAGUCUGAGUGGGCGGC |
| 110 | B12 | UGAUAAUAGGCUGGAGCCUCGGUGGCCUAGCUUCUU |
| | | GCCCCUUGGGCCUCCCCCCAGCCCCUCCUCCCCUUCC |
| | | UGCACCCGUACCCCCCAAACACCAUUGUCACACUCCA |
| | | GUGGUCUUUGAAUAAAGUCUGAGUGGGCGGC |
| 111 | B13 | UGAUAAUAGGCUGGAGCCUCGGUGGCCUAGCUUCUU |
| | | GCCCCUUGGGCCUCCCCCCAGCCCCUCCUCCCCUUCC |
| | | UGCACCCGUACCCCCUCCAUAAAGUAGGAAACACUAC |
| | | AGUGGUCUUUGAAUAAAGUCUGAGUGGGGGC |
| 112 | B14 | UGAUAAUAGGCUGGAGCCUCGGUGGCCUAGCUUCUU |
| | | GCCCCUUGGGCCUCCCCCCAGCCCCUCCUCCCCUUCC |
| | | UGCACCCGUACCCCCCGCAUUAUUACUCACGGUACGA |
| | | GUGGUCUUUGAAUAAAGUCUGAGUGGGCGGC |
| 113 | B15 | UGAUAAUAGUCCAUAAAGUAGGAAACACUACAGCUG |
| | | GAGCCUCGGUGGCCAUGCUUCUUGCCCCUUGGGCCUC |
| | | CCCCCAGCCCCUCCUCCCCUUCCUGCACCCGUACCCCC |
| | | CGCAUUAUUACUCACGGUACGAGUGGUCUUUGAAUA |
| | | AAGUCUGAGUGGGCGGC |
| 114 | B16 | UGAUAAUAGUCCAUAAAGUAGGAAACACUACAGCUG |
| | | GAGCCUCGGUGGCCUAGCUUCUUGCCCCUUGGGCCUC |
| | | CAUAAAGUAGGAAACACUACAUCCCCCCAGCCCCUCC |
| | | UCCCCUUCCUGCACCCGUACCCCCUCCAUAAAGUAGG |
| | | AAACACUACAGUGGUCUUUGAAUAAAGUCUGAGUGG |
| | | GCGGC |
| 115 | B2 | CUGAGAGACCUGUGUGAACUAUUGAGAAGAUCGGAA |
| | | CAGCUCCUUACUCUGAGGAAGUUG |
| 116 | B17 | UGAUAAUAGGCUGGAGCCUCUCACACACCUCUGCCCC |
| | | UUGGGCCUCCCACUCCCAUGGCUCUGGGCGGUCCAGA |
| | | AGGAGCGUACCCCCGUGGUCUUUGAAUAAAGUCUGA |
| | | GUGGGCGGC |
| 117 | B18 | UGAUAAUAGGCUGGAGCCUCCACCGCGUUAUCCGUU |
| | | CCUCGUAGGCUGGUCCUGGGGAACGGGUCGGCGGGU |
| | | ACCCCCGUGGUCUUUGAAUAAAGUCUGAGUGGGOGG |
| | | C |
| 118 | B19 | UGAUAAUAGGCUGGAGCCUCUGCCCGGCAACGGCCA |
| | | GGUCUGUGCCAAGUGUUUGCUGACGCAACCCCCACUG |
| | | GCUGGGGCUUGGUCAUGGGCCAUCAGCGCGUGCGUG |
| | | GAACCUUUUCGGCUCCUCUGCCGAUCCAUACUGCGGA |
| | | ACUCCUAGCCGCUUGUUUUGCUCGCAGCAGGUCUGG |
| | | AGCAAACAUUAUCGGGACUGAUAACUCUGUUGUCCU |
| | | GUACCCCCGUGGUCUUUGAAUAAAGUCUGAGUGGGC |
| | | GGC |
| 119 | B20 | UGAUAAUAGGCUGGAGCCUCGGUGGCCUAGCUUCUU |
| | | GCCCCUUGGGCCUCCCCCCAGCCCCUCCUCCCCUUCC |
| | | UGCACCCGUACCCUUUUUUUUUUUUUUUUUUUCUUC |
| | | UUUUCUUUUUUUUCUUUUUUUUUUUUCUUUCUUUUU |
| | | UUCUUUUUUUUUCUUUUUUUUUUCUUUUUUUUUUU |
| | | UUUUUCCGUGGUCUUUGAAUAAAGUCUGAGUGGGCG |
| | | GC |
| 120 | B21 | UGAUAAUAGGCUGGAGCCUCGGUGGCCUAGCUUCUU |
| | | GCCCCUUGGGCCUCCCCCCAGCCCCUCCUCCCCUUCC |
| | | UGCACCCGUACCCUUUUUUUUUUUUUUUUUUUUUUU |
| | | UUUUUUUUUUUUUUUUUUUUUUUUUUUUUUUUUUUU |
| | | UUUUUUUUUUUUUUUUUUUUUUUUUUUUUUUUUUUU |
| | | UUUUUCCGUGGUCUUUGAAUAAAGUCUGAGUGGGCG |
| | | GC |
| 133 | B22 | UAAGUCUCCAUAAAGUAGGAAACACUACAGCUGGAG |
| | | CCUCGGUGGCCUAGCUUCUUGCCCCUUGGGCCUCCAU |
| | | AAAGUAGGAAACACUACAUCCCCCCAGCCCCUCCUCC |
| | | CCUUCCUGCACCCGUACCCCCUCCAUAAAGUAGGAAA |
| | | CACUACAGUGGUCUUUGAAUAAAGUCUGAGUGGGCG |
| | | GC |
| 134 | B23 | UAAAGCGCUGGAGCCUCGGUGGCCUAGCUUCUUGCCC |
| | | CUUGGGCCUCCCCCCAGCCCCUCCUCCCCUUCCUGCA |
| | | CCCGUACCCCCUCCAUAAAGUAGGAAACACUACAGUG |
| | | GUCUUUGAAUAAAGUCUGAGUGGGCGGC |
| 135 | B24 | UAAAGCUCCCCGGGGUCCAUAAAGUAGGAAACACUA |
| | | CAGCUGGAGCCUCCUGAGAGACCUGUGUGAACUAUU |
| | | GAGAAGAUCGGAACAGCUCCUUACUCUGAGGAAGUU |
| | | GUCCAUAAAGUAGGAAACACUACAGUACCCCCUCCAU |
| | | AAAGUAGGAAACACUACAGUGGUCUUUGAAUAAAGU |
| | | CUGAGUGGGCGGC |
| 136 | B25 | UAAUAGUAAACCUCACUCACGGCCACAUUGAGUGCC |
| | | AGGCUCCGGGCUGGUUUAUAGUAGUGUAGAGCAUUG |
| | | CAGCACUUAGACUGGGGUGCUGUAGUCUUUAUUGUA |
| | | GUCUUUCCACAUACCUGAUAAUUCUUAGAUAAUUUC |
| | | UUAUUUUAAUUCCAUAAAGUAGGAAACACUACAUAA |
| | | AUCUCCAUAAAGUAGGAAACACUACAUAUUCUUCCA |
| | | UAAAGUAGGAAACACUACAUAGGCU |
| 137 | B26 | GCCUCCACCGCGUUAUCCGUUCCUCGUAGGCUGGUCC |
| | | UGGGGAACGGGUCGGCGGGUACCCCCGUGGUCUUUG |
| | | AAUAAAGUCUGAGUGGGCGGC |
| 138 | B27 | CACCGCGUUAUCCGUUCCUCGUAGGCUGGUCCUGGGG |
| | | AACGGGUCGGCGGGCCUCGGUGGCCUAGCUUCUUGCC |
| | | CCUUGGGCCCACCGCGUUAUCCGUUCCUCGUAGGCUG |
| | | GUCCUGGGGAACGGGUCGGCGGUCCCCCCAGCCCCUC |
| | | CUCCCCUUCCUGCACCCGUACCCCCCACCGCGUUAUC |
| | | CGUUCCUCGUAGGCUGGUCCUGGGGAACGGGUCGGC |
| | | GGGUGGUCUUUGAAUAAAGUCUGAGUGGGCGGC |
| 139 | B28 | UAAAGCUCCCCGGGGGCCUCGGUGGCCUAGCUUCUUG |
| | | CCCCUUGGGCCUCCCCCCAGCCCCUCCUCCCCUUCCU |
| | | GCACCCGUACCCCCGUGGUCUUUGAAUAAAGUCUGA |
| | | GUGGGCGGC |
| 140 | B29 | UAAGUCUCCGCUGGAGCCUCGGUGGCCUAGCUUCUU |
| | | GCCCCUUGGGCCUCCCCCCAGCCCCUCCUCCCCUUCC |
| | | UGCACCCGUACCCCCGUGGUCUUUGAAUAAAGUCUG |
| | | AGUGGGCGGC |
| 141 | B30 | UAAGCCCCUCCGGGGGCCUCGGUGGCCUAGCUUCUUG |
| | | CCCCUUGGGCCUCCCCCCAGCCCCUCCUCCCCUUCCU |
| | | GCACCCGUACCCCCGUGGUCUUUGAAUAAAGUCUGA |
| | | GUGGGCGGC |

[1408] In an embodiment, the 3′ UTR comprises a micro RNA (miRNA) binding site, e.g., as described herein, which binds to a miR present in a human cell. In an embodiment, the 3′ UTR comprises a miRNA binding site of SEQ ID NO: 212, SEQ ID NO: 174, SEQ TD NO: 152 or a combination thereof. In an embodiment, the 3′ UTR comprises a plurality of miRNA binding sites, e.g., 2, 3, 4, 5, 6, 7, or 8 miRNA binding sites. In an embodiment, the plurality of miRNA binding sites comprises the same or different miRNA binding sites.

(SEQ ID NO: 212)
miR122 bs = CAAACACCAUUGUCACACUCCA
(SEQ ID NO: 174)
miR-142-3p bs = UCCAUAAAGUAGGAAACACUACA
(SEQ ID NO: 152)
miR-126 bs = CGCAUUAUUACUCACGGUACGA

[1409] In an aspect, disclosed herein is a polynucleotide encoding a polypeptide, wherein the polynucleotide comprises: (a) a 5′-UTR, e.g., as described herein; (b) a coding region comprising a stop element (e.g., as described herein); and (c) a 3′-UTR (e.g., as described herein).

[1410] In an aspect, an LNP composition comprising a polynucleotide comprising an open reading frame encoding a metabolic reprogramming molecule polypeptide and, optionally a membrane anchoring moiety (e.g., any one of SEQ ID NOs: 2, 3, 24, 5, 7, 9, 11, 13-15, 17, 19, 21, 23, 26, 28, 30, 32, 34, 36, 38, 40, 42, or 300-332) and comprising a 3′ UTR disclosed herein comprises: (i) an ionizable lipid, e.g., an amino lipid; (ii) a sterol or other structural lipid; (iii) a non-cationic helper lipid or phospholipid; and (iv) a PEG-lipid.

### Regions Having a 5′ Cap

[1411] The disclosure also includes a polynucleotide that comprises both a 5′ Cap and a polynucleotide of the present invention (e.g., a polynucleotide comprising a nucleotide sequence encoding a metabolic reprogramming molecule polypeptide).

[1412] The 5′ cap structure of a natural mRNA is involved in nuclear export, increasing mRNA stability and binds the mRNA Cap Binding Protein (CBP), which is responsible for mRNA stability in the cell and translation competency through the association of CBP with poly(A) binding protein to form the mature cyclic mRNA species. The cap further assists the removal of 5′ proximal introns during mRNA splicing.

[1413] Endogenous mRNA molecules can be 5′-end capped generating a 5′-ppp-5′-triphosphate linkage between a terminal guanosine cap residue and the 5′-terminal transcribed sense nucleotide of the mRNA molecule. This 5′-guanylate cap can then be methylated to generate an N7-methyl-guanylate residue. The ribose sugars of the terminal and/or ante-terminal transcribed nucleotides of the 5′ end of the mRNA can optionally also be 2′-O-methylated. 5′-decapping through hydrolysis and cleavage of the guanylate cap structure can target a nucleic acid molecule, such as an mRNA molecule, for degradation.

[1414] In some embodiments, the polynucleotides of the present invention (e.g., a polynucleotide comprising a nucleotide sequence encoding a metabolic reprogramming molecule polypeptide) incorporate a cap moiety.

[1415] In some embodiments, polynucleotides of the present invention (e.g., a polynucleotide comprising a nucleotide sequence encoding a metabolic reprogramming molecule polypeptide) comprise a non-hydrolyzable cap structure preventing decapping and thus increasing mRNA half-life. Because cap structure hydrolysis requires cleavage of 5′-ppp-5′ phosphorodiester linkages, modified nucleotides can be used during the capping reaction. For example, a Vaccinia Capping Enzyme from New England Biolabs (Ipswich, MA) can be used with a-thio-guanosine nucleotides according to the manufacturer's instructions to create a phosphorothioate linkage in the 5′-ppp-5′ cap. Additional modified guanosine nucleotides can be used such as a-methyl-phosphonate and seleno-phosphate nucleotides.

[1416] Additional modifications include, but are not limited to, 2′-O-methylation of the ribose sugars of 5′-terminal and/or 5′-anteterminal nucleotides of the polynucleotide (as mentioned above) on the 2′-hydroxyl group of the sugar ring. Multiple distinct 5′-cap structures can be used to generate the 5′-cap of a nucleic acid molecule, such as a polynucleotide that functions as an mRNA molecule. Cap analogs, which herein are also referred to as synthetic cap analogs, chemical caps, chemical cap analogs, or structural or functional cap analogs, differ from natural (i.e., endogenous, wild-type or physiological) 5′-caps in their chemical structure, while retaining cap function. Cap analogs can be chemically (i.e., non-enzymatically) or enzymatically synthesized and/or linked to the polynucleotides of the invention.

[1417] For example, the Anti-Reverse Cap Analog (ARCA) cap contains two guanines linked by a 5′-5′-triphosphate group, wherein one guanine contains an N7 methyl group as well as a 3′-O-methyl group (i.e., N7,3′-O-dimethyl-guanosine-5′-triphosphate-5′-guanosine (m7G-3′mppp-G; which can equivalently be designated 3′ O-Me-m7G(5′)ppp(5′)G). The 3′-O atom of the other, unmodified, guanine becomes linked to the 5′-terminal nucleotide of the capped polynucleotide. The N7- and 3′-O-methlyated guanine provides the terminal moiety of the capped polynucleotide.

[1418] Another exemplary cap is mCAP, which is similar to ARCA but has a 2′-O-methyl group on guanosine (i.e., N7,2′-O-dimethyl-guanosine-5′-triphosphate-5′-guanosine, m7Gm-ppp-G).

[1419] Another exemplary cap is m⁷G-ppp-Gm-A (i.e., N7, guanosine-5′-triphosphate-2′-O-dimethyl-guanosine-adenosine).

[1420] In some embodiments, the cap is a dinucleotide cap analog. As a non-limiting example, the dinucleotide cap analog can be modified at different phosphate positions with a boranophosphate group or a phosphoroselenoate group such as the dinucleotide cap analogs described in U.S. Pat. No. 8,519,110, the contents of which are herein incorporated by reference in its entirety.

[1421] In another embodiment, the cap is a cap analog is a N7-(4-chlorophenoxyethyl) substituted dinucleotide form of a cap analog known in the art and/or described herein. Non-limiting examples of a N7-(4-chlorophenoxyethyl) substituted dinucleotide form of a cap analog include a N7-(4-chlorophenoxyethyl)-G(5′)ppp(5′)G and a N7-(4-chlorophenoxyethyl)-m3′—OG(5′)ppp(5′)G cap analog (See, e.g., the various cap analogs and the methods of synthesizing cap analogs described in Kore et al. Bioorganic & Medicinal Chemistry 2013 21:4570-4574; the contents of which are herein incorporated by reference in its entirety). In another embodiment, a cap analog of the present invention is a 4-chloro/bromophenoxyethyl analog.

[1422] While cap analogs allow for the concomitant capping of a polynucleotide or a region thereof, in an in vitro transcription reaction, up to 20% of transcripts can remain uncapped. This, as well as the structural differences of a cap analog from an endogenous 5′-cap structures of nucleic acids produced by the endogenous, cellular transcription machinery, can lead to reduced translational competency and reduced cellular stability.

[1423] Polynucleotides of the invention (e.g., a polynucleotide comprising a nucleotide sequence encoding a metabolic reprogramming molecule polypeptide) can also be capped post-manufacture (whether IVT or chemical synthesis), using enzymes, to generate more authentic 5′-cap structures. As used herein, the phrase “more authentic” refers to a feature that closely mirrors or mimics, either structurally or functionally, an endogenous or wild type feature. That is, a “more authentic” feature is better representative of an endogenous, wild-type, natural or physiological cellular function and/or structure as compared to synthetic features or analogs, etc., of the prior art, or which outperforms the corresponding endogenous, wild-type, natural or physiological feature in one or more respects. Non-limiting examples of more authentic 5′cap structures of the present invention are those that, among other things, have enhanced binding of cap binding proteins, increased half-life, reduced susceptibility to 5′ endonucleases and/or reduced 5′ decapping, as compared to synthetic 5′ cap structures known in the art (or to a wild-type, natural or physiological 5′ cap structure). For example, recombinant Vaccinia Virus Capping Enzyme and recombinant 2′-O-methyltransferase enzyme can create a canonical 5′-5′-triphosphate linkage between the 5′-terminal nucleotide of a polynucleotide and a guanine cap nucleotide wherein the cap guanine contains an N7 methylation and the 5′-terminal nucleotide of the mRNA contains a 2′-O-methyl. Such a structure is termed the Cap1 structure. This cap results in a higher translational-competency and cellular stability and a reduced activation of cellular pro-inflammatory cytokines, as compared, e.g., to other 5′ cap analog structures known in the art. Cap structures include, but are not limited to, 7mG(5′)ppp(5′)N1pN2p (cap 0), 7mG(5′)ppp(5′)N1mpNp (cap 1), and 7mG(5′)-ppp(5′)N1mpN2mp (cap 2). Cap 1 is sometimes referred to as Cap C₁ herein. In some embodiments, Cap C₁ can optionally include an additional G at the 3′ end of the cap. In some embodiments, in Cap C₁, N2 may comprise the first nucleotide of a 5′ UTR.

[1424] As a non-limiting example, capping chimeric polynucleotides post-manufacture can be more efficient as nearly 100% of the chimeric polynucleotides can be capped. This is in contrast to ˜80% efficiency when a cap analog is linked to a chimeric polynucleotide during an in vitro transcription reaction.

[1425] According to the present invention, 5′ terminal caps can include endogenous caps or cap analogs. According to the present invention, a 5′ terminal cap can comprise a guanine analog. Useful guanine analogs include, but are not limited to, inosine, N1-methyl-guanosine, 2′fluoro-guanosine, 7-deaza-guanosine, 8-oxo-guanosine, 2-amino-guanosine, LNA-guanosine, and 2-azido-guanosine.

[1426] Also provided herein are exemplary caps including those that can be used in co-transcriptional capping methods for ribonucleic acid (RNA) synthesis, using RNA polymerase, e.g., wild type RNA polymerase or variants thereof, e.g., such as those variants described herein. In one embodiment, caps can be added when RNA is produced in a “one-pot” reaction, without the need for a separate capping reaction. Thus, the methods, in some embodiments, comprise reacting a polynucleotide template with an RNA polymerase variant, nucleoside triphosphates, and a cap analog under in vitro transcription reaction conditions to produce RNA transcript.

[1427] A cap analog may be, for example, a dinucleotide cap, a trinucleotide cap, or a tetranucleotide cap. In some embodiments, a cap analog is a dinucleotide cap. In some embodiments, a cap analog is a trinucleotide cap. In some embodiments, a cap analog is a tetranucleotide cap. As used here the term “cap” includes the inverted G nucleotide and can comprise one or more additional nucleotides 3′ of the inverted G nucleotide, e.g., 1, 2, or more nucleotides 3′ of the inverted G nucleotide and 5′ to the 5′ UTR, e.g., a 5′ UTR described herein.

[1428] Exemplary caps comprise a sequence of GG, GA, or GGA, wherein the underlined, italicized G is an in inverted G nucleotide followed by a 5′-5′-triphosphate group.

[1429] A trinucleotide cap, in some embodiments, comprises a compound of formula (I)

[chemical structure]

or a stereoisomer, tautomer or salt thereof, wherein

[chemical structure]

[1430] ring B1 is a modified or unmodified Guanine;
[1431] ring B2 and ring B3 each independently is a nucleobase or a modified nucleobase;
[1432] X2 is O, S(O)p, NR24 or CR25R26 in which p is 0, 1, or 2;
[1433] Y0 is O or CR6R7;
[1434] Y1 is O, S(O)n, CR6R7, or NR8, in which n is 0, 1, or 2;
[1435] each --- is a single bond or absent, wherein when each --- is a single bond, Yi is O, S(O)n, CR6R7, or NR8; and when each --- is absent, Y1 is void;
[1436] Y2 is (OP(O)R4)m in which m is 0, 1, or 2, or —O—(CR40R41)u-Q0-(CR42R43)v-, in which Q0 is a bond, O, S(O)r, NR44, or CR45R46, r is 0, 1, or 2, and each of u and v independently is 1, 2, 3 or 4;
[1437] each R2 and R2′ independently is halo, LNA, or OR3;
   each R3 independently is H, C₁-C₆ alkyl, C₂-C₆ alkenyl, or C₂-C₆ alkynyl and R3, when being C₁-C₆ alkyl, C₂-C₆ alkenyl, or C₂-C₆ alkynyl, is optionally substituted with one or more of halo, OH and C₁-C₆ alkoxyl that is optionally substituted with one or more OH or OC(O)—C₁-C₆ alkyl;
[1438] each R4 and R4′ independently is H, halo, C₁-C₆ alkyl, OH, SH, SeH, or BH3-;
[1439] each of R6, R7, and R8, independently, is -Q1-T1, in which Q1 is a bond or C₁-C₃ alkyl linker optionally substituted with one or more of halo, cyano, OH and C₁-C₆ alkoxy, and T1 is H, halo, OH, COOH, cyano, or Rs1, in which Rs1 is C₁-C₃ alkyl, C₂-C₆ alkenyl, C₂-C₆ alkynyl, C1-C6 alkoxyl, C(O)O-C1-C6 alkyl, C3-C8 cycloalkyl, C6-C10 aryl, NR31R32, (NR31R32R33)+, 4 to 12-membered heterocycloalkyl, or 5- or 6-membered heteroaryl, and Rs1 is optionally substituted with one or more substituents selected from the group consisting of halo, OH, oxo, C1-C6 alkyl, COOH, C(O)O-C1-C6 alkyl, cyano, C1-C6 alkoxyl, NR31R32, (NR31R32R33)+, C3-C8 cycloalkyl, C6-C10 aryl, 4 to 12-membered heterocycloalkyl, and 5- or 6-membered heteroaryl;
[1440] each of R10, R11, R12, R13 R14, and R15, independently, is -Q2-T2, in which Q2 is a bond or C1-C3 alkyl linker optionally substituted with one or more of halo, cyano, OH and C1-C6 alkoxy, and T2 is H, halo, OH, NH₂, cyano, NO₂, N3, Rs2, or ORs2, in which Rs2 is C1-C6 alkyl, C2-C6 alkenyl, C2-C6 alkynyl, C3-C8 cycloalkyl, C6-C10 aryl, NHC(O)—C1-C6 alkyl, NR31R32, (NR31R32R33)+, 4 to 12-membered heterocycloalkyl, or 5- or 6-membered heteroaryl, and Rs2 is optionally substituted with one or more substituents selected from the group consisting of halo, OH, oxo, C1-C6 alkyl, COOH, C(O)O-C1-C6 alkyl, cyano, C1-C6 alkoxyl, NR31R32, (NR31R32R33)+, C3-C8 cycloalkyl, C6-C10 aryl, 4 to 12-membered heterocycloalkyl, and 5- or 6-membered heteroaryl; or alternatively R12 together with R14 is oxo, or R13 together with R15 is oxo,
[1441] each of R20, R21, R22, and R23 independently is -Q3-T3, in which Q3 is a bond or C1-C3 alkyl linker optionally substituted with one or more of halo, cyano, OH and C1-C6 alkoxy, and T3 is H, halo, OH, NH₂, cyano, NO₂, N3, RS3, or ORS3, in which RS3 is C1-C6 alkyl, C2—C6 alkenyl, C2-C6 alkynyl, C3-C8 cycloalkyl, C6-C10 aryl, NHC(O)—C1-C6 alkyl, mono-C1-C6 alkylamino, di-C1-C6 alkylamino, 4 to 12-membered heterocycloalkyl, or 5- or 6-membered heteroaryl, and Rs3 is optionally substituted with one or more substituents selected from the group consisting of halo, OH, oxo, C1-C6 alkyl, COOH, C(O)O-C1-C6 alkyl, cyano, C1-C6 alkoxyl, amino, mono-C1-C6 alkylamino, di-C1-C6 alkylamino, C3-C8 cycloalkyl, C6-C10 aryl, 4 to 12-membered heterocycloalkyl, and 5- or 6-membered heteroaryl;
[1442] each of R24, R25, and R26 independently is H or C1-C6 alkyl;
[1443] each of R27 and R28 independently is H or OR29; or R27 and R28 together form O-R30-O; each R29 independently is H, C1-C6 alkyl, C2-C6 alkenyl, or C2-C6 alkynyl and R29, when being C1-C6 alkyl, C2-C6 alkenyl, or C2-C6 alkynyl, is optionally substituted with one or more of halo, OH and C1-C6 alkoxyl that is optionally substituted with one or more OH or OC(O)—C1-C6 alkyl;
[1444] R30 is C1-C6 alkylene optionally substituted with one or more of halo, OH and C1-C6 alkoxyl;
[1445] each of R31, R32, and R33, independently is H, C1-C6 alkyl, C3-C8 cycloalkyl, C6-C10 aryl, 4 to 12-membered heterocycloalkyl, or 5- or 6-membered heteroaryl;
[1446] each of R40, R41, R42, and R43 independently is H, halo, OH, cyano, N3, OP(O)R47R48, or C1-C6 alkyl optionally substituted with one or more OP(O)R47R48, or one R41 and one R43, together with the carbon atoms to which they are attached and Q0, form C4—C10 cycloalkyl, 4- to 14-membered heterocycloalkyl, C6-C10 aryl, or 5- to 14-membered heteroaryl, and each of the cycloalkyl, heterocycloalkyl, phenyl, or 5- to 6-membered heteroaryl is optionally substituted with one or more of OH, halo, cyano, N3, oxo, OP(O)R47R48, C1-C6 alkyl, C1-C6 haloalkyl, COOH, C(O)O-C1-C6 alkyl, C1-C6 alkoxyl, C1-C6 haloalkoxyl, amino, mono-C1-C6 alkylamino, and di-C1-C6 alkylamino; R44 is H, C1-C6 alkyl, or an amine protecting group;
   each of R45 and R46 independently is H, OP(O)R47R48, or C1-C6 alkyl optionally substituted with one or more OP(O)R47R48, and each of R47 and R48, independently is H, halo, C1-C6 alkyl, OH, SH, SeH, or BH3.

[1447] It should be understood that a cap analog, as provided herein, may include any of the cap analogs described in international publication WO 2017/066797, published on 20 Apr. 2017, incorporated by reference herein in its entirety.

[1448] In some embodiments, the B2 middle position can be a non-ribose molecule, such as arabinose.

[1449] In some embodiments R2 is ethyl-based.

[1450] Thus, in some embodiments, a trinucleotide cap comprises the following structure:

[chemical structure]

[1451] In other embodiments, a trinucleotide cap comprises the following structure:

[chemical structure]

[1452] In yet other embodiments, a trinucleotide cap comprises the following structure:

[chemical structure]

[1453] In still other embodiments, a trinucleotide cap comprises the following structure:

[chemical structure]

[1454] In some embodiments, R is an alkyl (e.g., C1-C6 alkyl). In some embodiments, R is a methyl group (e.g., C1 alkyl). In some embodiments, R is an ethyl group (e.g., C2 alkyl).

[1455] A dinucleotide cap, in some embodiments, comprises a compound of formula (I-b)

[chemical structure]

or a stereoisomer, tautomer or salt thereof, wherein

[chemical structure]

[1456] ring B1 is a modified or unmodified Guanine;
[1457] ring B2 is a nucleobase or a modified nucleobase;
[1458] X2 is O, S(O)p, NR24 or CR25R26 in which p is 0, 1, or 2;
[1459] Y0 is O or CR6R7;
[1460] Y1 is O, S(O)n, CR6R7, or NR8, in which n is 0, 1, or 2;
[1461] each [symbol] is a single bond or absent, wherein when each [symbol] is a single bond, Y1 is O, S(O)n, CR6R7, or NR8; and when each [symbol] is absent, Y1 is void;
[1462] Y2 is (OP(O)R4)m in which m is 0, 1, or 2, or —O—(CR40R41)u-Q0—(CR42R43)v-, in which Q0 is a bond, O, S(O)r, NR44, or CR45R46, r is 0, 1, or 2, and each of u and v independently is 1, 2, 3 or 4;
[1463] R2 is halo, LNA, or OR3;
   each R3 independently is H, C1-C6 alkyl, C2-C6 alkenyl, or C2-C6 alkynyl and R3, when being C1-C6 alkyl, C2-C6 alkenyl, or C2-C6 alkynyl, is optionally substituted with one or more of halo, OH and C1-C6 alkoxyl that is optionally substituted with one or more OH or OC(O)—C1-C6 alkyl;
[1464] R4 is H, halo, C1-C6 alkyl, OH, SH, SeH, or BH3-;
[1465] each of R6, R7, and R8, independently, is -Q1-T1, in which Q1 is a bond or C1-C3 alkyl linker optionally substituted with one or more of halo, cyano, OH and C1-C6 alkoxy, and T1 is H, halo, OH, COOH, cyano, or Rs1, in which Rs1 is C1-C3 alkyl, C2-C6 alkenyl, C2-C6 alkynyl, C1-C6 alkoxyl, C(O)O-C1-C6 alkyl, C3-C8 cycloalkyl, C6-C10 aryl, NR31R32, (NR31R32R33)*, 4 to 12-membered heterocycloalkyl, or 5- or 6-membered heteroaryl, and Rs1 is optionally substituted with one or more substituents selected from the group consisting of halo, OH, oxo, C1-C6 alkyl, COOH, C(O)O-C1-C6 alkyl, cyano, C1-C6 alkoxyl, NR31R32, (NR31R32R33)+, C3-C8 cycloalkyl, C6-C10 aryl, 4 to 12-membered heterocycloalkyl, and 5- or 6-membered heteroaryl;
[1466] each of R10, R11, R12, R13 R14, and R15, independently, is -Q2-T2, in which Q2 is a bond or C1-C3 alkyl linker optionally substituted with one or more of halo, cyano, OH and C1-C6 alkoxy, and T2 is H, halo, OH, NH₂, cyano, NO₂, N3, Rs2, or ORs2, in which Rs2 is C1-C6 alkyl, C2-C6 alkenyl, C2-C6 alkynyl, C3-C8 cycloalkyl, C6-C10 aryl, NHC(O)—C1-C6 alkyl, NR31R32, (NR31R32R33)+, 4 to 12-membered heterocycloalkyl, or 5- or 6-membered heteroaryl, and Rs2 is optionally substituted with one or more substituents selected from the group consisting of halo, OH, oxo, C1-C6 alkyl, COOH, C(O)O-C1-C6 alkyl, cyano, C1-C6 alkoxyl, NR31R32, (NR31R32R33)+, C3-C8 cycloalkyl, C6-C10 aryl, 4 to 12-membered heterocycloalkyl, and 5- or 6-membered heteroaryl; or alternatively R12 together with R14 is oxo, or R13 together with R15 is oxo,
[1467] each of R20, R21, R22, and R23 independently is -Q3-T3, in which Q3 is a bond or C1-C3 alkyl linker optionally substituted with one or more of halo, cyano, OH and C1-C6 alkoxy, and T3 is H, halo, OH, NH₂, cyano, NO₂, N3, RS3, or ORS3, in which RS3 is C1-C6 alkyl, C2—C6 alkenyl, C2-C6 alkynyl, C3-C8 cycloalkyl, C6-C10 aryl, NHC(O)—C1-C6 alkyl, mono-C1-C6 alkylamino, di-C1-C6 alkylamino, 4 to 12-membered heterocycloalkyl, or 5- or 6-membered heteroaryl, and Rs3 is optionally substituted with one or more substituents selected from the group consisting of halo, OH, oxo, C1-C6 alkyl, COOH, C(O)O-C1-C6 alkyl, cyano, C1-C6 alkoxyl, amino, mono-C1-C6 alkylamino, di-C1-C6 alkylamino, C3-C8 cycloalkyl, C6-C10 aryl, 4 to 12-membered heterocycloalkyl, and 5- or 6-membered heteroaryl;
[1468] each of R24, R25, and R26 independently is H or C1-C6 alkyl;
[1469] each of R27 and R28 independently is H or OR29; or R27 and R28 together form O-R30-O; each R29 independently is H, C1-C6 alkyl, C2-C6 alkenyl, or C2-C6 alkynyl and R29, when being C1-C6 alkyl, C2-C6 alkenyl, or C2-C6 alkynyl, is optionally substituted with one or more of halo, OH and C1-C6 alkoxyl that is optionally substituted with one or more OH or OC(O)—C1-C6 alkyl;
[1470] R30 is C1-C6 alkylene optionally substituted with one or more of halo, OH and C1-C6 alkoxyl;
[1471] each of R31, R32, and R33, independently is H, C1-C6 alkyl, C3-C8 cycloalkyl, C6-C10 aryl, 4 to 12-membered heterocycloalkyl, or 5- or 6-membered heteroaryl;
[1472] each of R40, R41, R42, and R43 independently is H, halo, OH, cyano, N3, OP(O)R47R48, or C1-C6 alkyl optionally substituted with one or more OP(O)R47R48, or one R41 and one R43, together with the carbon atoms to which they are attached and Q0, form C4—C10 cycloalkyl, 4- to 14-membered heterocycloalkyl, C6-C10 aryl, or 5- to 14-membered heteroaryl, and each of the cycloalkyl, heterocycloalkyl, phenyl, or 5- to 6-membered heteroaryl is optionally substituted with one or more of OH, halo, cyano, N3, oxo, OP(O)R47R48, C1-C6 alkyl, C1-C6 haloalkyl, COOH, C(O)O-C1-C6 alkyl, C1-C6 alkoxyl, C1-C6 haloalkoxyl, amino, mono-C1-C6 alkylamino, and di-C1-C6 alkylamino;
   R44 is H, C1-C6 alkyl, or an amine protecting group;
   each of R45 and R46 independently is H, OP(O)R47R48, or C1-C6 alkyl optionally substituted with one or more OP(O)R47R48, and
   each of R47 and R48, independently is H, halo, C1-C6 alkyl, OH, SH, SeH, or BH3.

[1473] Thus, in some embodiments, a dinucleotide cap comprises the following structure:

[chemical structure]

[1474] A trinucleotide cap, in some embodiments, comprises a sequence selected from the following sequences: GAA, GAC, GAG, GAU, GCA, GCC, GCG, GCU, GGA, GGC, GGG, GGU, GUA, GUC, GUG, and GUU. In some embodiments, a trinucleotide cap comprises GAA.

[1475] In some embodiments, a trinucleotide cap comprises GAC. In some embodiments, a trinucleotide cap comprises GAG. In some embodiments, a trinucleotide cap comprises GAU. In some embodiments, a trinucleotide cap comprises GCA. In some embodiments, a trinucleotide cap comprises GCC. In some embodiments, a trinucleotide cap comprises GCG. In some embodiments, a trinucleotide cap comprises GCU. In some embodiments, a trinucleotide cap comprises GGA. In some embodiments, a trinucleotide cap comprises GGC. In some embodiments, a trinucleotide cap comprises GGG. In some embodiments, a trinucleotide cap comprises GGU. In some embodiments, a trinucleotide cap comprises GUA. In some embodiments, a trinucleotide cap comprises GUC. In some embodiments, a trinucleotide cap comprises GUG. In some embodiments, a trinucleotide cap comprises GUU.

[1476] In some embodiments, a trinucleotide cap comprises a sequence selected from the following sequences: m⁷ GpppApA, m⁷ GpppApC, m⁷ GpppApG, m⁷GpppApU, m⁷GpppCpA, m⁷GpppCpC, m⁷ GpppCpG, m⁷ GpppCpU, m⁷ GpppGpA, m⁷GpppGpC, m⁷ GpppGpG, m⁷GpppGpU, m⁷ GpppUpA, m⁷GpppUpC, m⁷ GpppUpG, and m⁷ GpppUpU.

[1477] In some embodiments, a trinucleotide cap comprises m⁷ GpppApA. In some embodiments, a trinucleotide cap comprises m⁷ GpppApC. In some embodiments, a trinucleotide cap comprises m⁷ GpppApG. In some embodiments, a trinucleotide cap comprises m⁷ GpppApU.

[1478] In some embodiments, a trinucleotide cap comprises m⁷ GpppCpA. In some embodiments, a trinucleotide cap comprises m⁷ GpppCpC. In some embodiments, a trinucleotide cap comprises m⁷GpppCpG. In some embodiments, a trinucleotide cap comprises m⁷ GpppCpU. In some embodiments, a trinucleotide cap comprises m⁷ GpppGpA. In some embodiments, a trinucleotide cap comprises m⁷ GpppGpC. In some embodiments, a trinucleotide cap comprises m⁷ GpppGpG.

[1479] In some embodiments, a trinucleotide cap comprises m⁷ GpppGpU. In some embodiments, a trinucleotide cap comprises m⁷ GpppUpA. In some embodiments, a trinucleotide cap comprises m⁷GpppUpC. In some embodiments, a trinucleotide cap comprises m⁷ GpppUpG. In some embodiments, a trinucleotide cap comprises m⁷ GpppUpU.

[1480] A trinucleotide cap, in some embodiments, comprises a sequence selected from the following sequences: m⁷G_{3′OMe}pppApA, m⁷G_{3′OMe}pppApC, m⁷G_{3′OMe}pppApG, m⁷G_{3′OMe}pppApU, m⁷G_{3′OMe}pppCpA, m⁷G_{3′OMe}pppCpC, m⁷G_{3′OMe}pppCpG, m⁷G_{3′OMe}pppCpU, m⁷G_{3′OMe}pppGpA, m⁷G_{3′OMe}pppGpC, m⁷G_{3′OMe}pppGpG, m⁷G_{3′OMe}pppGpU, m⁷G_{3′OMe}pppUpA, m⁷G_{3′OMe}pppUpC, m⁷G_{3′OMe}pppUpG, and m⁷G_{3′OMe}pppUpU.

[1481] In some embodiments, a trinucleotide cap comprises m⁷G_{3′OMe}pppApA. In some embodiments, a trinucleotide cap comprises m⁷G_{3′OMe}pppApC. In some embodiments, a trinucleotide cap comprises m⁷G_{3′OMe}pppApG. In some embodiments, a trinucleotide cap comprises m⁷G_{3′OMe}pppApU. In some embodiments, a trinucleotide cap comprises m⁷G_{3′OMe}pppCpA. In some embodiments, a trinucleotide cap comprises m7G_{3′OMe}pppCpC. In some embodiments, a trinucleotide cap comprises m⁷G_{3′OMe}pppCpG. In some embodiments, a trinucleotide cap comprises m⁷G_{3′OMe}pppCpU. In some embodiments, a trinucleotide cap comprises m⁷G_{3′OMe}pppGpA. In some embodiments, a trinucleotide cap comprises m⁷G_{3′OMe}pppGpC. In some embodiments, a trinucleotide cap comprises m7G_{3′OMe}pppGpG. In some embodiments, a trinucleotide cap comprises m⁷G_{3′OMe}pppGpU. In some embodiments, a trinucleotide cap comprises m⁷G_{3′OMe}pppUpA. In some embodiments, a trinucleotide cap comprises m⁷G_{3′OMe}pppUpC. In some embodiments, a trinucleotide cap comprises m⁷G_{3′OMe}pppUpG. In some embodiments, a trinucleotide cap comprises m⁷G_{3′OMe}pppUpU.

[1482] A trinucleotide cap, in other embodiments, comprises a sequence selected from the following sequences: m⁷G_{3′OMe}pppA_{2′OMe}pA, m⁷G_{3′OMe}pppA_{2′OMe}pC, m⁷G_{3′OMe}pppA_{2′OMe}pG, m⁷G_{3′OMe}pppA_{2′OMe}pU, m⁷G_{3′OMe}pppC_{2′OMe}pA, m⁷G_{3′OMe}pppC_{2′OMe}pC, m⁷G_{3′OMe}pppC_{2′OMe}pG, m⁷G_{3′OMe}pppC_{2′OMe}pU, m⁷G_{3′OMe}pppG_{2′OMe}pA, m⁷G_{3′OMe}pppG_{2′OMe}pC, m⁷G_{3′OMe}pppG_{2′OMe}pG, m⁷G_{3′OMe}pppG_{2′OMe}pU, m⁷G_{3′OMe}pppU_{2′OMe}pA, m⁷G_{3′OMe}pppU_{2′OMe}pC, m⁷G_{3′OMe}pppU_{2′OMe}pG, and m⁷G_{3′OMe}pppU_{2′OMe}pU.

[1483] In some embodiments, a trinucleotide cap comprises m⁷G_{3′OMe}pppA_{2′OMe}pA. In some embodiments, a trinucleotide cap comprises m⁷G_{3′OMe}pppA_{2′OMe}pC. In some embodiments, a trinucleotide cap comprises m⁷G_{3′OMe}pppA_{2′OMe}pG. In some embodiments, a trinucleotide cap comprises m⁷G_{3′OMe}pppA_{2′OMe}pU. In some embodiments, a trinucleotide cap comprises m⁷G_{3′OMe}pppC_{2′OMe}pA. In some embodiments, a trinucleotide cap comprises m⁷G_{3′OMe}pppC_{2′OMe}pC. In some embodiments, a trinucleotide cap comprises m⁷G_{3′OMe}pppC_{2′OMe}pG. In some embodiments, a trinucleotide cap comprises m⁷G_{3′OMe}pppC_{2′OMe}pU. In some embodiments, a trinucleotide cap comprises m⁷G_{3′OMe}pppG_{2′OMe}pA. In some embodiments, a trinucleotide cap comprises m⁷G_{3′OMe}pppG_{2′OMe}pC. In some embodiments, a trinucleotide cap comprises m⁷G_{3′OMe}pppG_{2′OMe}pG. In some embodiments, a trinucleotide cap comprises m⁷G_{3′OMe}pppG_{2′OMe}pU. In some embodiments, a trinucleotide cap comprises m⁷G_{3′OMe}pppU_{2′OMe}pA. In some embodiments, a trinucleotide cap comprises m⁷G_{3′OMe}pppU_{2′OMe}pC. In some embodiments, a trinucleotide cap comprises m⁷G_{3′OMe}pppU_{2′OMe}pG. In some embodiments, a trinucleotide cap comprises m⁷G_{3′OMe}pppU_{2′OMe}pU.

[1484] A trinucleotide cap, in still other embodiments, comprises a sequence selected from the following sequences: m⁷GpppA_{2′OMe}pA, m⁷GpppA_{2′OMe}pC, m⁷GpppA_{2′OMe}pG, m⁷GpppA_{2′OMe}pU, m⁷GpppC_{2′OMe}pA, m⁷GpppC_{2′OMe}pC, m⁷GpppC_{2′OMe}pG, m⁷GpppC_{2′OMe}pU, m⁷GpppG_{2′OMe}pA, m⁷GpppG_{2′OMe}pC, m⁷GpppG_{2′OMe}pG, m⁷GpppG_{2′OMe}pU, m⁷GpppU_{2′OMe}pA, m⁷GpppU_{2′OMe}pC, m⁷GpppU_{2′OMe}pG, and m⁷GpppU_{2′OMe}pU.

[1485] In some embodiments, a trinucleotide cap comprises m⁷GpppA_{2′OMe}pA. In some embodiments, a trinucleotide cap comprises m⁷GpppA_{2′OMe}pC. In some embodiments, a trinucleotide cap comprises m⁷GpppA_{2′OMe}pG. In some embodiments, a trinucleotide cap comprises m⁷GpppA_{2′OMe}pU. In some embodiments, a trinucleotide cap comprises m⁷GpppC_{2′OMe}pA. In some embodiments, a trinucleotide cap comprises m7GpppC_{2′OMe}pC. In some embodiments, a trinucleotide cap comprises m⁷GpppC_{2′OMe}pG. In some embodiments, a trinucleotide cap comprises m⁷GpppC_{2′OMe}pU. In some embodiments, a trinucleotide cap comprises m⁷GpppG_{2′OMe}pA. In some embodiments, a trinucleotide cap comprises m⁷GpppG_{2′OMe}pC. In some embodiments, a trinucleotide cap comprises m7GpppG_{2′OMe}pG. In some embodiments, a trinucleotide cap comprises m⁷GpppG_{2′OMe}pU. In some embodiments, a trinucleotide cap comprises m⁷GpppU_{2′OMe}pA. In some embodiments, a trinucleotide cap comprises m⁷GpppU_{2′OMe}pC. In some embodiments, a trinucleotide cap comprises m⁷GpppU_{2′OMe}pG. In some embodiments, a trinucleotide cap comprises m⁷GpppU_{2′OMe}pU.

[1486] In some embodiments, a trinucleotide cap comprises m⁷Gpppm⁶A_{2′Ome}pG. In some embodiments, a trinucleotide cap comprises m⁷Gpppe⁶A_{2′Ome}pG.

[1487] In some embodiments, a trinucleotide cap comprises GAG. In some embodiments, a trinucleotide cap comprises GCG. In some embodiments, a trinucleotide cap comprises GUG. In some embodiments, a trinucleotide cap comprises GGG.

[1488] In some embodiments, a trinucleotide cap comprises any one of the following structures:

[chemical structure]

[1489] In some embodiments, the cap analog comprises a tetranucleotide cap. In some embodiments, the tetranucleotide cap comprises a trinucleotide as set forth above. In some embodiments, the tetranucleotide cap comprises ^{m7}GpppN₁N₂N₃, where N₁, N₂, and N₃ are optional (i.e., can be absent or one or more can be present) and are independently a natural, a modified, or an unnatural nucleoside base. In some embodiments, ^{m}7G is further methylated, e.g., at the 3′ position. In some embodiments, the ^{m}7G comprises an O-methyl at the 3′ position. In some embodiments N₁, N₂, and N₃ if present, optionally, are independently an adenine, a uracil, a guanidine, a thymine, or a cytosine. In some embodiments, one or more (or all) of N₁, N₂, and N₃, if present, are methylated, e.g., at the 2′ position. In some embodiments, one or more (or all) of N₁, N₂, and N₃, if present have an O-methyl at the 2′ position.

[1490] In some embodiments, the tetranucleotide cap comprises the following structure:

[chemical structure]

[1491] wherein B₁, B₂, and B₃ are independently a natural, a modified, or an unnatural nucleoside based; and R₁, R₂, R₃, and R₄ are independently OH or O-methyl. In some embodiments, R₃ is O-methyl and R₄ is OH. In some embodiments, R₃ and R₄ are O-methyl. In some embodiments, R₄ is O-methyl. In some embodiments, R₁ is OH, R₂ is OH, R₃ is O-methyl, and R₄ is OH. In some embodiments, R₁ is OH, R₂ is OH, R₃ is O-methyl, and R₄ is O-methyl.

[1492] In some embodiments, at least one of R₁ and R₂ is O-methyl, R₃ is O-methyl, and R₄ is OH. In some embodiments, at least one of R₁ and R₂ is O-methyl, R₃ is O-methyl, and R₄ is O-methyl.

[1493] In some embodiments, Bi, B₃, and B₃ are natural nucleoside bases. In some embodiments, at least one of Bi, B₂, and B₃ is a modified or unnatural base. In some embodiments, at least one of Bi, B₂, and B₃ is N₆-methyladenine. In some embodiments, Bi is adenine, cytosine, thymine, or uracil. In some embodiments, Bi is adenine, B₂ is uracil, and B₃ is adenine. In some embodiments, R₁ and R₂ are OH, R₃ and R₄ are O-methyl, Bi is adenine, B₂ is uracil, and B₃ is adenine.

[1494] In some embodiments the tetranucleotide cap comprises a sequence selected from the following sequences: GAAA, GACA, GAGA, GAUA, GCAA, GCCA, GCGA, GCUA, GGAA, GGCA, GGGA, GGUA, GUCA, and GUUJA. In some embodiments the tetranucleotide cap comprises a sequence selected from the following sequences: GAAG, GACG, GAGG, GAUG, GCAG, GCCG, GCGG, GCUG, GGAG, GGCG, GGGG, GGUG, GUCG, GUGG, and GUUG.

[1495] In some embodiments the tetranucleotide cap comprises a sequence selected from the following sequences: GAAU, GACU, GAGU, GAUU, GCAU, GCCU, GCGU, GCUU, GGAU, GGCU, GGGU, GGUU, GUAU, GUCU, GUGU, and GUUU. In some embodiments the tetranucleotide cap comprises a sequence selected from the following sequences: GAAC, GACC, GAGC, GAUC, GCAC, GCCC, GCGC, GCUC, GGAC, GGCC, GGGC, GGUC, GUAC, GUCC, GUGC, and GUUC.

[1496] A tetranucleotide cap, in some embodiments, comprises a sequence selected from the following sequences: m⁷G_{3′OMe}pppApApN, m⁷G_{3′OMe}pppApCpN, m⁷G_{3′OMe}pppApGpN, m⁷G_{3′OMe}pppApUpN, m⁷G_{3′OMe}pppCpApN, m⁷G_{3′OMe}pppCpCpN, m⁷G_{3′OMe}pppCpGpN, m⁷G_{3′OMe}pppCpUpN, m⁷G_{3′OMe}pppGpApN, m⁷G_{3′OMe}pppGpCpN, m⁷G_{3′OMe}pppGpGpN, m⁷G_{3′OMe}pppGpUpN, m⁷G_{3′OMe}pppUpApN, m⁷G_{3′OMe}pppUpCpN, m⁷G_{3′OMe}pppUpGpN, and m⁷G_{3′OMe}pppUpUpN, where N is a natural, a modified, or an unnatural nucleoside base.

[1497] A tetranucleotide cap, in other embodiments, comprises a sequence selected from the following sequences: m⁷G_{3′OMe}pppA_{2′OMe}pApN, m⁷G_{3′OMe}pppA_{2′OMe}pCpN, m⁷G_{3′OMe}pppA_{2′OMe}pGpN, m⁷G_{3′OMe}pppA_{2′OMe}pUpN, m⁷G_{3′OMe}pppC_{2′OMe}pApN, m⁷G_{3′OMe}pppC_{2′OMe}pCpN, m⁷G_{3′OMe}pppC_{2′OMe}pGpN, m⁷G_{3′OMe}pppC_{2′OMe}pUpN, m⁷G_{3′OMe}pppG_{2′OMe}pApN, m⁷G_{3′OMe}pppG_{2′OMe}pCpN, m⁷G_{3′OMe}pppG_{2′OMe}pGpN, m⁷G_{3′OMe}pppG_{2′OMe}pUpN, m⁷G_{3′OMe}pppU_{2′OMe}pApN, m⁷G_{3′OMe}pppU_{2′OMe}pCpN, m⁷G_{3′OMe}pppU_{2′OMe}pGpN, and m⁷G_{3′OMe}pppU_{2′OMe}pUpN, where N is a natural, a modified, or an unnatural nucleoside base.

[1498] A tetranucleotide cap, in still other embodiments, comprises a sequence selected from the following sequences: m⁷GpppA_{2′OMe}pApN, m⁷GpppA_{2′OMe}pCpN, m⁷GpppA_{2′OMe}pGpN, m⁷GpppA_{2′OMe}pUpN, m⁷GpppC_{2′OMe}pApN, m⁷GpppC_{2′OMe}pCpN, m⁷GpppC_{2′OMe}pGpN, m⁷GpppC_{2′OMe}pUpN, m⁷GpppG_{2′OMe}pApN, m⁷GpppG_{2′OMe}pCpN, m⁷GpppG_{2′OMe}pGpN, m⁷GpppG_{2′OMe}pUpN, m⁷GpppU_{2′OMe}pApN, m⁷GpppU_{2′OMe}pCpN, m⁷GpppU_{2′OMe}pGpN, and m⁷GpppU_{2′OMe}pUpN, where N is a natural, a modified, or an unnatural nucleoside base.

[1499] A tetranucleotide cap, in other embodiments, comprises a sequence selected from the following sequences: m⁷G_{3′OMe}pppA_{2′OMe}pA_{2′OMe}pN, m⁷G_{3′OMe}pppA_{2′OMe}pC_{2′OMe}pN, m⁷G_{3′OMe}pppA_{2′OMe}pG_{2′OMe}pN, m⁷G_{3′OMe}pppA_{2′OMe}pU_{2′OMe}pN, m⁷G_{3′OMe}pppC_{2′OMe}pA_{2′OMe}pN, m⁷G_{3′OMe}pppC_{2′OMe}pC_{2′OMe}pN, m⁷G_{3′OMe}pppC_{2′OMe}pG_{2′OMe}pN, m⁷G_{3′OMe}pppC_{2′OMe}pU_{2′OMe}pN, m⁷G_{3′OMe}pppG_{2′OMe}pA_{2′OMe}pN, m⁷G_{3′OMe}pppG_{2′OMe}pC_{2′OMe}pN, m⁷G_{3′OMe}pppG_{2′OMe}pG_{2′OMe}pN, m⁷G_{3′OMe}pppG_{2′OMe}pU_{2′OMe}pN, m⁷G_{3′OMe}pppU_{2′OMe}pA_{2′OMe}pN, m⁷G_{3′OMe}pppU_{2′OMe}pC_{2′OMe}pN, m⁷G_{3′OMe}pppU_{2′OMe}pG_{2′OMe}pN, and m⁷G_{3′OMe}pppU_{2′OMe}pU_{2′OMe}pN, where N is a natural, a modified, or an unnatural nucleoside base.

[1500] A tetranucleotide cap, in still other embodiments, comprises a sequence selected from the following sequences: m⁷GpppA_{2′OMe}pA_{2′OMe}pN, m⁷GpppA_{2′OMe}pC_{2′OMe}pN, m⁷GpppA_{2′OMe}pG_{2′OMe}pN, m⁷GpppA_{2′OMe}pU_{2′OMe}pN, m⁷GpppC_{2′OMe}pA_{2′OMe}pN, m⁷GpppC_{2′OMe}pC_{2′OMe}pN, m⁷GpppC_{2′OMe}pG_{2′OMe}pN, m⁷GpppC_{2′OMe}pU_{2′OMe}pN, m⁷GpppG_{2′OMe}pA_{2′OMe}pN, m⁷GpppG_{2′OMe}pC_{2′OMe}pN, m⁷GpppG_{2′OMe}pG_{2′OMe}pN, m⁷GpppG_{2′OMe}pU_{2′OMe}pN, m⁷GpppU_{2′OMe}pA_{2′OMe}pN, m⁷GpppU_{2′OMe}pC_{2′OMe}pN, m⁷GpppU_{2′OMe}pG_{2′OMe}pN, and m⁷GpppU_{2′OMe}pU_{2′OMe}pN, where N is a natural, a modified, or an unnatural nucleoside base.

[1501] In some embodiments, a tetranucleotide cap comprises GGAG. In some embodiments, a tetranucleotide cap comprises the following structure:

[chemical structure]

### Tails, e.g., Poly A Tails

[1502] In some embodiments, the polynucleotides of the present disclosure (e.g., a polynucleotide comprising a nucleotide sequence encoding a metabolic reprogramming molecule polypeptide) further comprise a tail, e.g., a poly-A tail. In further embodiments, terminal groups on the poly-A tail can be incorporated for stabilization. In other embodiments, a poly-A tail comprises des-3′ hydroxyl tails.

[1503] During RNA processing, a long chain of adenine nucleotides (poly-A tail) can be added to a polynucleotide such as an mRNA molecule to increase stability. Immediately after transcription, the 3′ end of the transcript can be cleaved to free a 3′ hydroxyl. Then poly-A polymerase adds a chain of adenine nucleotides to the RNA. The process, called polyadenylation, adds a poly-A tail that can be between, for example, approximately 80 to approximately 250 residues long, including approximately 80, 90, 100, 110, 120, 130, 140, 150, 160, 170, 180, 190, 200, 210, 220, 230, 240 or 250 residues long. In one embodiment, the poly-A tail is 100 nucleotides in length (SEQ ID NO: 502). aaaaaaaaaa aaaaaaaaaa aaaaaaaaaa aaaaaaaaaa aaaaaaaaaa aaaaaaaaaa aaaaaaaaaa aaaaaaaaaa aaaaaaaaaa aaaaaaaaaa (SEQ ID NO: 502) PolyA tails can also be added after the construct is exported from the nucleus.

[1504] According to the present invention, terminal groups on the poly A tail can be incorporated for stabilization. Polynucleotides of the present invention can include des-3′ hydroxyl tails. They can also include structural moieties or 2′-Omethyl modifications as taught by Junjie Li, et al. (Current Biology, Vol. 15, 1501-1507, Aug. 23, 2005, the contents of which are incorporated herein by reference in its entirety).

[1505] The polynucleotides of the present invention can be designed to encode transcripts with alternative polyA tail structures including histone mRNA. According to Norbury, “Terminal uridylation has also been detected on human replication-dependent histone mRNAs. The turnover of these mRNAs is thought to be important for the prevention of potentially toxic histone accumulation following the completion or inhibition of chromosomal DNA replication. These mRNAs are distinguished by their lack of a 3′ poly(A) tail, the function of which is instead assumed by a stable stem-loop structure and its cognate stem-loop binding protein (SLBP); the latter carries out the same functions as those of PABP on polyadenylated mRNAs” (Norbury, “Cytoplasmic RNA: a case of the tail wagging the dog,” Nature Reviews Molecular Cell Biology; AOP, published online 29 Aug. 2013; doi:10.1038/nrm3645) the contents of which are incorporated herein by reference in its entirety.

[1506] Unique poly-A tail lengths provide certain advantages to the polynucleotides of the present invention. Generally, the length of a poly-A tail, when present, is greater than 30 nucleotides in length. In another embodiment, the poly-A tail is greater than 35 nucleotides in length (e.g., at least or greater than about 35, 40, 45, 50, 55, 60, 70, 80, 90, 100, 120, 140, 160, 180, 200, 250, 300, 350, 400, 450, 500, 600, 700, 800, 900, 1,000, 1,100, 1,200, 1,300, 1,400, 1,500, 1,600, 1,700, 1,800, 1,900, 2,000, 2,500, and 3,000 nucleotides).

[1507] In some embodiments, the polynucleotide or region thereof includes from about 30 to about 3,000 nucleotides (e.g., from 30 to 50, from 30 to 100, from 30 to 250, from 30 to 500, from 30 to 750, from 30 to 1,000, from 30 to 1,500, from 30 to 2,000, from 30 to 2,500, from 50 to 100, from 50 to 250, from 50 to 500, from 50 to 750, from 50 to 1,000, from 50 to 1,500, from 50 to 2,000, from 50 to 2,500, from 50 to 3,000, from 100 to 500, from 100 to 750, from 100 to 1,000, from 100 to 1,500, from 100 to 2,000, from 100 to 2,500, from 100 to 3,000, from 500 to 750, from 500 to 1,000, from 500 to 1,500, from 500 to 2,000, from 500 to 2,500, from 500 to 3,000, from 1,000 to 1,500, from 1,000 to 2,000, from 1,000 to 2,500, from 1,000 to 3,000, from 1,500 to 2,000, from 1,500 to 2,500, from 1,500 to 3,000, from 2,000 to 3,000, from 2,000 to 2,500, and from 2,500 to 3,000).

[1508] In some embodiments, the poly-A tail is designed relative to the length of the overall polynucleotide or the length of a particular region of the polynucleotide. This design can be based on the length of a coding region, the length of a particular feature or region or based on the length of the ultimate product expressed from the polynucleotides.

[1509] In this context, the poly-A tail can be 10, 20, 30, 40, 50, 60, 70, 80, 90, or 100% greater in length than the polynucleotide or feature thereof. The poly-A tail can also be designed as a fraction of the polynucleotides to which it belongs. In this context, the poly-A tail can be 10, 20, 30, 40, 50, 60, 70, 80, or 90% or more of the total length of the construct, a construct region or the total length of the construct minus the poly-A tail. Further, engineered binding sites and conjugation of polynucleotides for Poly-A binding protein can enhance expression.

[1510] Additionally, multiple distinct polynucleotides can be linked together via the PABP (Poly-A binding protein) through the 3′-end using modified nucleotides at the 3′-terminus of the poly-A tail. Transfection experiments can be conducted in relevant cell lines at and protein production can be assayed by ELISA at 12 hr, 24 hr, 48 hr, 72 hr and day 7 post-transfection.

[1511] In some embodiments, the polynucleotides of the present invention are designed to include a polyA-G Quartet region. The G-quartet is a cyclic hydrogen bonded array of four guanine nucleotides that can be formed by G-rich sequences in both DNA and RNA. In this embodiment, the G-quartet is incorporated at the end of the poly-A tail. The resultant polynucleotide is assayed for stability, protein production and other parameters including half-life at various time points. It has been discovered that the polyA-G quartet results in protein production from an mRNA equivalent to at least 75% of that seen using a poly-A tail of 120 nucleotides alone (SEQ ID NO: 503). aaaaaaaaaa aaaaaaaaaa aaaaaaaaaa aaaaaaaaaa aaaaaaaaaa aaaaaaaaaa aaaaaaaaaa aaaaaaaaaa aaaaaaaaaa aaaaaaaaaa aaaaaaaaaa aaaaaaaaaa (SEQ ID NO: 503) In some embodiments, the polyA tail comprises an alternative nucleoside, e.g., inverted thymidine. PolyA tails comprising an alternative nucleoside, e.g., inverted thymidine, may be generated as described herein. For instance, mRNA constructs may be modified by ligation to stabilize the poly(A) tail. Ligation may be performed using 0.5-1.5 mg/mL mRNA (5′ Cap1, 3′ A100), 50 mM Tris-HCl pH 7.5, 10 mM MgCl2, 1 mM TCEP, 1000 units/mL T4 RNA Ligase 1, 1 mM ATP, 20% w/v polyethylene glycol 8000, and 5:1 molar ratio of modifying oligo to mRNA. Modifying oligo has a sequence of 5′-phosphate-AAAAAAAAAAAAAAAAAAAA-(inverted deoxythymidine (idT) (SEQ ID NO:209)) (see below). Ligation reactions are mixed and incubated at room temperature (−22° C.) for, e.g., 4 hours. Stable tail mRNA are purified by, e.g., dT purification, reverse phase purification, hydroxyapatite purification, ultrafiltration into water, and sterile filtration. The resulting stable tail-containing mRNAs contain the following structure at the 3′end, starting with the polyA region: A100-UCUAGAAAAAAAAAAAAAAAAAAAA-inverted deoxythymidine (SEQ ID NO:211).

[1512] Modifying oligo to stabilize tail (5′-phosphate-AAAAAAAAAAAAAAAAAAAA-(inverted deoxythymidine)(SEQ ID NO:209)) (see below):

[chemical structure]

### Start Codon Region

[1513] The invention also includes a polynucleotide that comprises both a start codon region and a polynucleotide described herein (e.g., a polynucleotide comprising a nucleotide sequence encoding a metabolic reprogramming molecule polypeptide). In some embodiments, the polynucleotides of the present invention can have regions that are analogous to or function like a start codon region.

[1514] In some embodiments, the translation of a polynucleotide can initiate on a codon that is not the start codon AUG. Translation of the polynucleotide can initiate on an alternative start codon such as, but not limited to, ACG, AGG, AAG, CTG/CUG, GTG/GUG, ATA/AUA, ATT/AUU, TTG/UUG (see Touriol et al. Biology of the Cell 95 (2003) 169-178 and Matsuda and Mauro PLoS ONE, 2010 5:11; the contents of each of which are herein incorporated by reference in its entirety).

[1515] As a non-limiting example, the translation of a polynucleotide begins on the alternative start codon ACG. As another non-limiting example, polynucleotide translation begins on the alternative start codon CTG or CUG. As another non-limiting example, the translation of a polynucleotide begins on the alternative start codon GTG or GUG.

[1516] Nucleotides flanking a codon that initiates translation such as, but not limited to, a start codon or an alternative start codon, are known to affect the translation efficiency, the length and/or the structure of the polynucleotide. (See, e.g., Matsuda and Mauro PLoS ONE, 2010 5:11; the contents of which are herein incorporated by reference in its entirety). Masking any of the nucleotides flanking a codon that initiates translation can be used to alter the position of translation initiation, translation efficiency, length and/or structure of a polynucleotide.

[1517] In some embodiments, a masking agent can be used near the start codon or alternative start codon to mask or hide the codon to reduce the probability of translation initiation at the masked start codon or alternative start codon. Non-limiting examples of masking agents include antisense locked nucleic acids (LNA) polynucleotides and exon-junction complexes (EJCs) (See, e.g., Matsuda and Mauro describing masking agents LNA polynucleotides and EJCs (PLoS ONE, 2010 5:11); the contents of which are herein incorporated by reference in its entirety).

[1518] In another embodiment, a masking agent can be used to mask a start codon of a polynucleotide to increase the likelihood that translation will initiate on an alternative start codon. In some embodiments, a masking agent can be used to mask a first start codon or alternative start codon to increase the chance that translation will initiate on a start codon or alternative start codon downstream to the masked start codon or alternative start codon.

[1519] In some embodiments, a start codon or alternative start codon can be located within a perfect complement for a miRNA binding site. The perfect complement of a miRNA binding site can help control the translation, length and/or structure of the polynucleotide similar to a masking agent. As a non-limiting example, the start codon or alternative start codon can be located in the middle of a perfect complement for a miRNA binding site. The start codon or alternative start codon can be located after the first nucleotide, second nucleotide, third nucleotide, fourth nucleotide, fifth nucleotide, sixth nucleotide, seventh nucleotide, eighth nucleotide, ninth nucleotide, tenth nucleotide, eleventh nucleotide, twelfth nucleotide, thirteenth nucleotide, fourteenth nucleotide, fifteenth nucleotide, sixteenth nucleotide, seventeenth nucleotide, eighteenth nucleotide, nineteenth nucleotide, twentieth nucleotide, or twenty-first nucleotide.

[1520] In another embodiment, the start codon of a polynucleotide can be removed from the polynucleotide sequence to have the translation of the polynucleotide begin on a codon that is not the start codon. Translation of the polynucleotide can begin on the codon following the removed start codon or on a downstream start codon or an alternative start codon. In a non-limiting example, the start codon ATG or AUG is removed as the first 3 nucleotides of the polynucleotide sequence to have translation initiate on a downstream start codon or alternative start codon. The polynucleotide sequence where the start codon was removed can further comprise at least one masking agent for the downstream start codon and/or alternative start codons to control or attempt to control the initiation of translation, the length of the polynucleotide and/or the structure of the polynucleotide.

### Stop Codon Region

[1521] The invention also includes a polynucleotide that comprises both a stop codon region and a polynucleotide described herein (e.g., a polynucleotide comprising a nucleotide sequence encoding a metabolic reprogramming molecule polypeptide). In some embodiments, the polynucleotides of the present invention can include at least two stop codons before the 3′ untranslated region (UTR). The stop codon can be selected from TGA, TAA and TAG in the case of DNA, or from UGA, UAA and UAG in the case of RNA. In some embodiments, the polynucleotides of the present invention include the stop codon TGA in the case or DNA, or the stop codon UGA in the case of RNA, and one additional stop codon. In a further embodiment the addition stop codon can be TAA or UAA. In another embodiment, the polynucleotides of the present invention include three consecutive stop codons, four stop codons, or more.

### 3′ Stabilizing Region

[1522] In some embodiments, the polynucleotides of the present disclosure (e.g., a polynucleotide comprising a nucleotide sequence encoding a metabolic reprogramming molecule polypeptide) further comprise a 3′ stabilizing region. In an embodiment, the polynucleotide comprises: (a) a 5′-UTR (e.g., as described herein); (b) a coding region comprising an open reading frame (ORF) (e.g., as described herein); (c) a 3′-UTR (e.g., as described herein), and (d) a 3′ stabilizing region. Also disclosed herein are LNP compositions comprising the same.

[1523] In an embodiment, the polynucleotide comprises a 3′ stabilizing region, e.g., a stabilized tail (e.g., as described herein). A polynucleotide containing a 3′-stabilizing region (e.g., a 3′-stabilizing region including an alternative nucleobase, sugar, and/or backbone) may be particularly effective for use in therapeutic compositions, because they may benefit from increased stability, high expression levels.

[1524] In an embodiment, the 3′ stabilizing region comprises a poly A tail, e.g., a poly A tail comprising 80-150, e.g., 120, adenines (SEQ ID NO: 370). In an embodiment, the poly A tail comprises a UCUAG sequence. In an embodiment, the poly A tail comprises about 80-120, e.g., 100, adenines upstream of SEQ ID NO: 270. In an embodiment, the poly A tail comprises about 1-40, e.g., 20, adenines downstream of SEQ ID NO: 270.

[1525] In an embodiment, the 3′ stabilizing region comprises at least one alternative nucleoside. In an embodiment, the alternative nucleoside is an inverted thymidine (idT). In an embodiment, the alternative nucleoside is disposed at the 3′ end of the 3′ stabilizing region.

[1526] In an embodiment, the 3′ stabilizing region comprises a structure of Formula VII:

[chemical structure]

or a salt thereof, wherein each X is independently O or S, and A represents adenine and T represents Thymine.

[1527] In an aspect, disclosed herein is an LNP composition comprising a polynucleotide (e.g., an mRNA) which encodes a metabolic reprogramming molecule (e.g., an IDO or TDO molecule described herein), wherein the polynucleotide comprises: (a) a 5′-UTR (e.g., as described herein); (b) a coding region comprising a stop element (e.g., as described herein); (c) a 3′-UTR (e.g., as described herein) and; (d) a 3′ stabilizing region (e.g., as described herein).

[1528] In an embodiment, the LNP composition comprises: (i) an ionizable lipid (e.g., an amino lipid); (ii) a sterol or other structural lipid; (iii) a non-cationic helper lipid or phospholipid; and (iv) a PEG-lipid.

### Methods of Making Polynucleotides

[1529] The present disclosure also provides methods for making a polynucleotide disclosed herein or a complement thereof. In some aspects, a polynucleotide (e.g., an mRNA) disclosed herein encoding a metabolic reprogramming molecule can be constructed using in vitro transcription.

[1530] In other aspects, a polynucleotide (e.g., an mRNA) disclosed herein encoding a metabolic reprogramming molecule can be constructed by chemical synthesis using an oligonucleotide synthesizer. In other aspects, a polynucleotide (e.g., an mRNA) disclosed herein encoding a metabolic reprogramming molecule is made by using a host cell. In certain aspects, a polynucleotide (e.g., an mRNA) disclosed herein encoding a metabolic reprogramming molecule is made by one or more combination of the IVT, chemical synthesis, host cell expression, or any other methods known in the art.

[1531] Naturally occurring nucleosides, non-naturally occurring nucleosides, or combinations thereof, can totally or partially naturally replace occurring nucleosides present in the candidate nucleotide sequence and can be incorporated into a sequence-optimized nucleotide sequence (e.g., an mRNA) encoding a metabolic reprograming molecule. The resultant mRNAs can then be examined for their ability to produce protein and/or produce a therapeutic outcome.

[1532] While RNA can be made synthetically using methods well known in the art, in one embodiment an RNA transcript (e.g., mRNA transcript) is synthesized by contacting a DNA template with a RNA polymerase (e.g., a T7 RNA polymerase or a T7 RNA polymerase variant) under conditions that result in the production of RNA transcript.

[1533] In some aspects, the present disclosure provides methods of performing an IVT (in vitro transcription) reaction, comprising contacting a DNA template with the RNA polymerase (e.g., a T7 RNA polymerase, such as a T7 RNA polymerase variant) in the presence of nucleoside triphosphates and buffer under conditions that result in the production of RNA transcripts.

[1534] Other aspects of the present disclosure provide capping methods, e.g., co-transcriptional capping methods or other methods known in the art. In one embodiment, a capping method comprises reacting a polynucleotide template with a T7 RNA polymerase variant, nucleoside triphosphates, and a cap analog under in vitro transcription reaction conditions to produce RNA transcript.

[1535] IVT conditions typically require a purified linear DNA template containing a promoter, nucleoside triphosphates, a buffer system that includes dithiothreitol (DTT) and magnesium ions, and a RNA polymerase. The exact conditions used in the transcription reaction depend on the amount of RNA needed for a specific application. Typical IVT reactions are performed by incubating a DNA template with a RNA polymerase and nucleoside triphosphates, including GTP, ATP, CTP, and UTP (or nucleotide analogs) in a transcription buffer. A RNA transcript having a 5′ terminal guanosine triphosphate is produced from this reaction.

[1536] A deoxyribonucleic acid (DNA) is simply a nucleic acid template for RNA polymerase. A DNA template may include a polynucleotide encoding a metabolic reprograming molecule polypeptide of interest (e.g., an IDO or TDO polypeptide disclosed herein). A DNA template, in some embodiments, includes a RNA polymerase promoter (e.g., a T7 RNA polymerase promoter) located 5′ from and operably linked to polynucleotide encoding a metabolic reprogramming molecule polypeptide of interest. A DNA template may also include a nucleotide sequence encoding a polyadenylation (polyA) tail located at the 3′ end of the gene of interest.

[1537] Polypeptides of interest include, but are not limited to, biologics, antibodies, antigens (vaccines), and therapeutic proteins. The term “protein” encompasses peptides.

[1538] A RNA transcript, in some embodiments, is the product of an IVT reaction and, as will be understood by one of ordinary skill in the art, the DNA template for making an RNA molecule is known based on base complementarity. A RNA transcript, in some embodiments, is a messenger RNA (mRNA) that includes a nucleotide sequence encoding a polypeptide of interest linked to a polyA tail. In some embodiments, the mRNA is modified mRNA (mmRNA), which includes at least one modified nucleotide.

[1539] A nucleotide includes a nitrogenous base, a five-carbon sugar (ribose or deoxyribose), and at least one phosphate group. Nucleotides include nucleoside monophosphates, nucleoside diphosphates, and nucleoside triphosphates. A nucleoside monophosphate (NMP) includes a nucleobase linked to a ribose and a single phosphate; a nucleoside diphosphate (NDP) includes a nucleobase linked to a ribose and two phosphates; and a nucleoside triphosphate (NTP) includes a nucleobase linked to a ribose and three phosphates. Nucleotide analogs are compounds that have the general structure of a nucleotide or are structurally similar to a nucleotide. Nucleotide analogs, for example, include an analog of the nucleobase, an analog of the sugar and/or an analog of the phosphate group(s) of a nucleotide.

[1540] A nucleoside includes a nitrogenous base and a 5-carbon sugar. Thus, a nucleoside plus a phosphate group yields a nucleotide. Nucleoside analogs are compounds that have the general structure of a nucleoside or are structurally similar to a nucleoside. Nucleoside analogs, for example, include an analog of the nucleobase and/or an analog of the sugar of a nucleoside.

[1541] It should be understood that the term “nucleotide” includes naturally occurring nucleotides, synthetic nucleotides and modified nucleotides, unless indicated otherwise.

[1542] Examples of naturally occurring nucleotides used for the production of RNA, e.g., in an IVT reaction, as provided herein include adenosine triphosphate (ATP), guanosine triphosphate (GTP), cytidine triphosphate (CTP), uridine triphosphate (UTP), and 5-methyluridine triphosphate (m5UTP). In some embodiments, adenosine diphosphate (ADP), guanosine diphosphate (GDP), cytidine diphosphate (CDP), and/or uridine diphosphate (UDP) are used.

[1543] Examples of nucleotide analogs include, but are not limited to, antiviral nucleotide analogs, phosphate analogs (soluble or immobilized, hydrolyzable or non-hydrolyzable), dinucleotide, trinucleotide, tetranucleotide, e.g., a cap analog, or a precursor/substrate for enzymatic capping (vaccinia or ligase), a nucleotide labeled with a functional group to facilitate ligation/conjugation of cap or 5′ moiety (IRES), a nucleotide labeled with a 5′ PO4 to facilitate ligation of cap or 5′ moiety, or a nucleotide labeled with a functional group/protecting group that can be chemically or enzymatically cleaved. Examples of antiviral nucleotide/nucleoside analogs include, but are not limited, to Ganciclovir, Entecavir, Telbivudine, Vidarabine and Cidofovir.

[1544] Modified nucleotides may include modified nucleobases. For example, a RNA transcript (e.g., mRNA transcript) of the present disclosure may include a modified nucleobase selected from pseudouridine (ψ), 1-methylpseudouridine (m1ψ), 1-ethylpseudouridine, 2-thiouridine, 4′-thiouridine, 2-thio-1-methyl-1-deaza-pseudouridine, 2-thio-1-methyl-pseudouridine, 2-thio-5-aza-uridine, 2-thio-dihydropseudouridine, 2-thio-dihydrouridine, 2-thio-pseudouridine, 4-methoxy-2-thio-pseudouridine, 4-methoxy-pseudouridine, 4-thio-1-methyl-pseudouridine, 4-thio-pseudouridine, 5-aza-uridine, dihydropseudouridine, 5-methyluridine, 5-methoxyuridine (mo5U) and 2′-O-methyl uridine. In some embodiments, a RNA transcript (e.g., mRNA transcript) includes a combination of at least two (e.g., 2, 3, 4, or more) of the foregoing modified nucleobases.

[1545] The nucleoside triphosphates (NTPs) as provided herein may comprise unmodified or modified ATP, modified or unmodified UTP, modified or unmodified GTP, and/or modified or unmodified CTP. In some embodiments, NTPs of an IVT reaction comprise unmodified ATP. In some embodiments, NTPs of an IVT reaction comprise modified ATP. In some embodiments, NTPs of an IVT reaction comprise unmodified UTP. In some embodiments, NTPs of an IVT reaction comprise modified UTP. In some embodiments, NTPs of an IVT reaction comprise unmodified GTP. In some embodiments, NTPs of an IVT reaction comprise modified GTP. In some embodiments, NTPs of an IVT reaction comprise unmodified CTP. In some embodiments, NTPs of an IVT reaction comprise modified CTP.

[1546] The concentration of nucleoside triphosphates and cap analog present in an IVT reaction may vary. In some embodiments, NTPs and cap analog are present in the reaction at equimolar concentrations. In some embodiments, the molar ratio of cap analog (e.g., trinucleotide cap) to nucleoside triphosphates in the reaction is greater than 1:1. For example, the molar ratio of cap analog to nucleoside triphosphates in the reaction may be 2:1, 3:1, 4:1, 5:1, 6:1, 7:1, 8:1, 9:1, 10:1, 15:1, 20:1, 25:1, 50:1, or 100:1. In some embodiments, the molar ratio of cap analog (e.g., trinucleotide cap) to nucleoside triphosphates in the reaction is less than 1:1. For example, the molar ratio of cap analog (e.g., trinucleotide cap) to nucleoside triphosphates in the reaction may be 1:2, 1:3, 1:4, 1:5, 1:6, 1:7, 1:8, 1:9, 1:10, 1:15, 1:20, 1:25, 1:50, or 1:100.

[1547] The composition of NTPs in an IVT reaction may also vary. For example, ATP may be used in excess of GTP, CTP and UTP. As a non-limiting example, an IVT reaction may include 7.5 millimolar GTP, 7.5 millimolar CTP, 7.5 millimolar UTP, and 3.75 millimolar ATP. The same IVT reaction may include 3.75 millimolar cap analog (e.g., trinucleotide cap). In some embodiments, the molar ratio of G:C:U:A:cap is 1:1:1:0.5:0.5. In some embodiments, the molar ratio of G:C:U:A:cap is 1:1:0.5:1:0.5. In some embodiments, the molar ratio of G:C:U:A:cap is 1:0.5:1:1:0.5. In some embodiments, the molar ratio of G:C:U:A:cap is 0.5:1:1:1:0.5.

[1548] In some embodiments, a RNA transcript (e.g., mRNA transcript) includes a modified nucleobase selected from pseudouridine (ψ), 1-methylpseudouridine (m1ψ), 5-methoxyuridine (mo⁵U), 5-methylcytidine (m⁵C), α-thio-guanosine and α-thio-adenosine. In some embodiments, a RNA transcript (e.g., mRNA transcript) includes a combination of at least two (e.g., 2, 3, 4 or more) of the foregoing modified nucleobases.

[1549] In some embodiments, a RNA transcript (e.g., mRNA transcript) includes pseudouridine (ψ). In some embodiments, a RNA transcript (e.g., mRNA transcript) includes 1-methylpseudouridine (m1ψ). In some embodiments, a RNA transcript (e.g., mRNA transcript) includes 5-methoxyuridine (mo⁵U). In some embodiments, a RNA transcript (e.g., mRNA transcript) includes 5-methylcytidine (m⁵C). In some embodiments, a RNA transcript (e.g., mRNA transcript) includes α-thio-guanosine. In some embodiments, a RNA transcript (e.g., mRNA transcript) includes α-thio-adenosine.

[1550] In some embodiments, the polynucleotide (e.g., RNA polynucleotide, such as mRNA polynucleotide) is uniformly modified (e.g., fully modified, modified throughout the entire sequence) for a particular modification. For example, a polynucleotide can be uniformly modified with 1-methylpseudouridine (m¹ψ), meaning that all uridine residues in the mRNA sequence are replaced with 1-methylpseudouridine (m¹ψ). Similarly, a polynucleotide can be uniformly modified for any type of nucleoside residue present in the sequence by replacement with a modified residue such as any of those set forth above. Alternatively, the polynucleotide (e.g., RNA polynucleotide, such as mRNA polynucleotide) may not be uniformly modified (e.g., partially modified, part of the sequence is modified). Each possibility represents a separate embodiment of the present invention.

[1551] In some embodiments, the buffer system contains tris. The concentration of tris used in an IVT reaction, for example, may be at least 10 mM, at least 20 mM, at least 30 mM, at least 40 mM, at least 50 mM, at least 60 mM, at least 70 mM, at least 80 mM, at least 90 mM, at least 100 mM or at least 110 mM phosphate. In some embodiments, the concentration of phosphate is 20-60 mM or 10-100 mM.

[1552] In some embodiments, the buffer system contains dithiothreitol (DTT). The concentration of DTT used in an IVT reaction, for example, may be at least 1 mM, at least 5 mM, or at least 50 mM. In some embodiments, the concentration of DTT used in an IVT reaction is 1-50 mM or 5-50 mM. In some embodiments, the concentration of DTT used in an IVT reaction is 5 mM.

[1553] In some embodiments, the buffer system contains magnesium. In some embodiments, the molar ratio of NTP to magnesium ions (Mg²⁺; e.g., MgCl2) present in an IVT reaction is 1:1 to 1:5. For example, the molar ratio of NTP to magnesium ions may be 1:1, 1:2, 1:3, 1:4 or 1:5.

[1554] In some embodiments, the molar ratio of NTP plus cap analog (e.g., trinucleotide cap, such as GAG) to magnesium ions (Mg²⁺; e.g., MgCl2) present in an IVT reaction is 1:1 to 1:5. For example, the molar ratio of NTP+trinucleotide cap (e.g., GAG) to magnesium ions may be 1:1, 1:2, 1:3, 1:4, or 1:5.

[1555] In some embodiments, the buffer system contains Tris-HCl, spermidine (e.g., at a concentration of 1-30 mM), TRITON® X-100 (polyethylene glycol p-(1,1,3,3-tetramethylbutyl)-phenyl ether) and/or polyethylene glycol (PEG).

[1556] The addition of nucleoside triphosphates (NTPs) to the 3′ end of a growing RNA strand is catalyzed by a polymerase, such as T7 RNA polymerase, for example, any one or more of the T7 RNA polymerase variants (e.g., G47A) of the present disclosure. In some embodiments, the RNA polymerase (e.g., T7 RNA polymerase variant) is present in a reaction (e.g., an IVT reaction) at a concentration of 0.01 mg/ml to 1 mg/ml. For example, the RNA polymerase may be present in a reaction at a concentration of 0.01 mg/mL, 0.05 mg/ml, 0.1 mg/ml, 0.5 mg/ml, or 1.0 mg/ml.

[1557] In some embodiments, the polynucleotide of the present disclosure is an IVT polynucleotide. Traditionally, the basic components of an mRNA molecule include at least a coding region, a 5′UTR, a 3′UTR, a 5′ cap and a poly-A tail. The IVT polynucleotides of the present disclosure can function as mRNA but are distinguished from wild-type mRNA in their functional and/or structural design features which serve, e.g., to overcome existing problems of effective polypeptide production using nucleic acid-based therapeutics.

[1558] The primary construct of an IVT polynucleotide comprises a first region of linked nucleotides that is flanked by a first flanking region and a second flaking region. This first region can include, but is not limited to, the encoded metabolic reprogramming molecule polypeptide. The first flanking region can include a sequence of linked nucleosides which function as a 5′ untranslated region (UTR) such as the 5′ UTR of any of the nucleic acids encoding the native 5′ UTR of the polypeptide or a non-native 5′UTR such as, but not limited to, a heterologous 5′ UTR or a synthetic 5′ UTR. The IVT encoding a metabolic reprogramming molecule polypeptide therapeutic payload or prophylactic payload can comprise at its 5 terminus a signal sequence region encoding one or more signal sequences. The flanking region can comprise a region of linked nucleotides comprising one or more complete or incomplete 5′ UTRs sequences. The flanking region can also comprise a 5′ terminal cap. The second flanking region can comprise a region of linked nucleotides comprising one or more complete or incomplete 3′ UTRs which can encode the native 3′ UTR of a metabolic reprogramming molecule polypeptide therapeutic payload or prophylactic payload, or a non-native 3′ UTR such as, but not limited to, a heterologous 3′ UTR or a synthetic 3′ UTR. The flanking region can also comprise a 3′ tailing sequence. The 3′ tailing sequence can be, but is not limited to, a polyA tail, a polyA-G quartet and/or a stem loop sequence.

[1559] Exemplary methods of making a polynucleotide disclosed herein include: in vitro transcription enzymatic synthesis and chemical synthesis which are disclosed in International PCT application WO 2017/201325, filed on 18 May 2017, the entire contents of which are hereby incorporated by reference.

### Chemical Synthesis

[1560] Standard methods can be applied to synthesize an isolated polynucleotide sequence encoding an isolated polypeptide of interest, such as a polynucleotide of the invention (e.g., a polynucleotide comprising a nucleotide sequence encoding a metabolic reprogramming molecule). For example, a single DNA or RNA oligomer containing a codon-optimized nucleotide sequence coding for the particular isolated polypeptide can be synthesized. In other aspects, several small oligonucleotides coding for portions of the desired polypeptide can be synthesized and then ligated. In some aspects, the individual oligonucleotides typically contain 5′ or 3′ overhangs for complementary assembly.

[1561] A polynucleotide disclosed herein (e.g., a RNA, e.g., an mRNA) can be chemically synthesized using chemical synthesis methods and potential nucleobase substitutions known in the art. See, for example, International Publication Nos. WO2014093924, WO2013052523; WO2013039857, WO2012135805, WO2013151671; U.S. Publ. No. US20130115272; or U.S. Pat. No. 8,999,380 or U.S. Pat. No. 8,710,200, all of which are herein incorporated by reference in their entireties.

### Purification

[1562] In other aspects, a polynucleotide (e.g., an mRNA) disclosed herein encoding a metabolic reprograming molecule can be purified. Purification of the polynucleotides (e.g., mRNA) encoding a metabolic reprograming molecule described herein can include, but is not limited to, polynucleotide clean-up, quality assurance and quality control. Clean-up can be performed by methods known in the arts such as, but not limited to, AGENCOURT® beads (Beckman Coulter Genomics, Danvers, MA), poly-T beads, LNA™ oligo-T capture probes (EXIQON® Inc, Vedbaek, Denmark) or HPLC based purification methods such as, but not limited to, strong anion exchange HPLC, weak anion exchange HPLC, reverse phase HPLC (RP-HPLC), and hydrophobic interaction HPLC (HIC-HPLC). The term “purified” when used in relation to a polynucleotide such as a “purified polynucleotide” refers to one that is separated from at least one contaminant. As used herein, a “contaminant” is any substance which makes another unfit, impure or inferior. Thus, a purified polynucleotide (e.g., DNA and RNA) is present in a form or setting different from that in which it is found in nature, or a form or setting different from that which existed prior to subjecting it to a treatment or purification method.

[1563] In some embodiments, purification of a polynucleotide (e.g., mRNA) encoding a metabolic reprogramming molecule of the disclosure removes impurities that can reduce or remove an unwanted immune response, e.g., reducing cytokine activity.

[1564] In some embodiments, the polynucleotide (e.g., mRNA) encoding a metabolic reprogramming molecule of the disclosure is purified prior to administration using column chromatography (e.g., strong anion exchange HPLC, weak anion exchange HPLC, reverse phase HPLC (RP-HPLC), and hydrophobic interaction HPLC (HIC-HPLC), or (LCMS)). In some embodiments, a column chromatography (e.g., strong anion exchange HPLC, weak anion exchange HPLC, reverse phase HPLC (RP-HPLC), and hydrophobic interaction HPLC (HIC-HPLC), or (LCMS)) purified polynucleotide, which encodes a metabolic reprogramming molecule a disclosed herein increases expression of the metabolic reprogramming molecule compared to polynucleotides encoding the metabolic reprogramming molecule purified by a different purification method.

[1565] In some embodiments, a column chromatography (e.g., strong anion exchange HPLC, weak anion exchange HPLC, reverse phase HPLC (RP-HPLC), and hydrophobic interaction HPLC (HIC-HPLC), or (LCMS)) purified polynucleotide encodes a metabolic reprogramming molecule. In some embodiments, the purified polynucleotide encodes a human metabolic reprogramming molecule.

[1566] In some embodiments, the purified polynucleotide is at least about 80% pure, at least about 85% pure, at least about 90% pure, at least about 95% pure, at least about 96% pure, at least about 97% pure, at least about 98% pure, at least about 99% pure, or about 100% pure.

[1567] A quality assurance and/or quality control check can be conducted using methods such as, but not limited to, gel electrophoresis, UV absorbance, or analytical HPLC.

[1568] In another embodiment, the polynucleotides can be sequenced by methods including, but not limited to reverse-transcriptase-PCR.

### Chemical Modifications of Polynucleotides

[1569] The present disclosure provides for modified nucleosides and nucleotides of a nucleic acid (e.g., RNA nucleic acids, such as mRNA nucleic acids). A “nucleoside” refers to a compound containing a sugar molecule (e.g., a pentose or ribose) or a derivative thereof in combination with an organic base (e.g., a purine or pyrimidine) or a derivative thereof (also referred to herein as “nucleobase”). A “nucleotide” refers to a nucleoside, including a phosphate group. Modified nucleotides may by synthesized by any useful method, such as, for example, chemically, enzymatically, or recombinantly, to include one or more modified or non-natural nucleosides. Nucleic acids can comprise a region or regions of linked nucleosides. Such regions may have variable backbone linkages. The linkages can be standard phosphodiester linkages, in which case the nucleic acids would comprise regions of nucleotides.

[1570] Modified nucleotide base pairing encompasses not only the standard adenosine-thymine, adenosine-uracil, or guanosine-cytosine base pairs, but also base pairs formed between nucleotides and/or modified nucleotides comprising non-standard or modified bases, wherein the arrangement of hydrogen bond donors and hydrogen bond acceptors permits hydrogen bonding between a non-standard base and a standard base or between two complementary non-standard base structures, such as, for example, in those nucleic acids having at least one chemical modification. One example of such non-standard base pairing is the base pairing between the modified nucleotide inosine and adenine, cytosine or uracil. Any combination of base/sugar or linker may be incorporated into nucleic acids of the present disclosure.

[1571] In some embodiments, modified nucleobases in nucleic acids (e.g., RNA nucleic acids, such as mRNA nucleic acids) comprise N₁-methyl-pseudouridine (m1ψ), 1-ethyl-pseudouridine (e1ψ), 5-methoxy-uridine (mo5U), 5-methyl-cytidine (m5C), and/or pseudouridine (ψ). In some embodiments, modified nucleobases in nucleic acids (e.g., RNA nucleic acids, such as mRNA nucleic acids) comprise 5-methoxymethyl uridine, 5-methylthio uridine, 1-methoxymethyl pseudouridine, 5-methyl cytidine, and/or 5-methoxy cytidine. In some embodiments, the polyribonucleotide includes a combination of at least two (e.g., 2, 3, 4 or more) of any of the aforementioned modified nucleobases, including but not limited to chemical modifications.

[1572] In some embodiments, a RNA nucleic acid of the disclosure comprises N₁-methyl-pseudouridine (m1ψ) substitutions at one or more or all uridine positions of the nucleic acid.

[1573] In some embodiments, a RNA nucleic acid of the disclosure comprises N₁-methyl-pseudouridine (m1ψ) substitutions at one or more or all uridine positions of the nucleic acid and 5-methyl cytidine substitutions at one or more or all cytidine positions of the nucleic acid.

[1574] In some embodiments, a RNA nucleic acid of the disclosure comprises pseudouridine (ψ) substitutions at one or more or all uridine positions of the nucleic acid.

[1575] In some embodiments, a RNA nucleic acid of the disclosure comprises pseudouridine (ψ) substitutions at one or more or all uridine positions of the nucleic acid and 5-methyl cytidine substitutions at one or more or all cytidine positions of the nucleic acid.

[1576] In some embodiments, a RNA nucleic acid of the disclosure comprises uridine at one or more or all uridine positions of the nucleic acid.

[1577] In some embodiments, nucleic acids (e.g., RNA nucleic acids, such as mRNA nucleic acids) are uniformly modified (e.g., fully modified, modified throughout the entire sequence) for a particular modification. For example, a nucleic acid can be uniformly modified with N₁-methyl-pseudouridine, meaning that all uridine residues in the mRNA sequence are replaced with N₁-methyl-pseudouridine. Similarly, a nucleic acid can be uniformly modified for any type of nucleoside residue present in the sequence by replacement with a modified residue such as those set forth above.

[1578] The nucleic acids of the present disclosure may be partially or fully modified along the entire length of the molecule. For example, one or more or all or a given type of nucleotide (e.g., purine or pyrimidine, or any one or more or all of A, G, U, C) may be uniformly modified in a nucleic acid of the disclosure, or in a predetermined sequence region thereof (e.g., in the mRNA including or excluding the polyA tail). In some embodiments, all nucleotides X in a nucleic acid of the present disclosure (or in a sequence region thereof) are modified nucleotides, wherein X may be any one of nucleotides A, G, U, C, or any one of the combinations A+G, A+U, A+C, G+U, G+C, U+C, A+G+U, A+G+C, G+U+C or A+G+C.

[1579] The nucleic acid may contain from about 1% to about 100% modified nucleotides (either in relation to overall nucleotide content, or in relation to one or more types of nucleotide, i.e., any one or more of A, G, U or C) or any intervening percentage (e.g., from 1% to 20%, from 1% to 25%, from 1% to 50%, from 1% to 60%, from 1% to 70%, from 1% to 80%, from 1% to 90%, from 1% to 95%, from 10% to 20%, from 10% to 25%, from 10% to 50%, from 10% to 60%, from 10% to 70%, from 10% to 80%, from 10% to 90%, from 10% to 95%, from 10% to 100%, from 20% to 25%, from 20% to 50%, from 20% to 60%, from 20% to 70%, from 20% to 80%, from 20% to 90%, from 20% to 95%, from 20% to 100%, from 50% to 60%, from 50% to 70%, from 50% to 80%, from 50% to 90%, from 50% to 95%, from 50% to 100%, from 70% to 80%, from 70% to 90%, from 70% to 95%, from 70% to 100%, from 80% to 90%, from 80% to 95%, from 80% to 100%, from 90% to 95%, from 90% to 100%, and from 95% to 100%). It will be understood that any remaining percentage is accounted for by the presence of unmodified A, G, U, or C.

[1580] The nucleic acids may contain at a minimum 1% and at maximum 100% modified nucleotides, or any intervening percentage, such as at least 5% modified nucleotides, at least 10% modified nucleotides, at least 25% modified nucleotides, at least 50% modified nucleotides, at least 80% modified nucleotides, or at least 90% modified nucleotides. For example, the nucleic acids may contain a modified pyrimidine such as a modified uracil or cytosine. In some embodiments, at least 5%, at least 10%, at least 25%, at least 50%, at least 80%, at least 90% or 100% of the uracil in the nucleic acid is replaced with a modified uracil (e.g., a 5-substituted uracil). The modified uracil can be replaced by a compound having a single unique structure, or can be replaced by a plurality of compounds having different structures (e.g., 2, 3, 4 or more unique structures). In some embodiments, at least 5%, at least 10%, at least 25%, at least 50%, at least 80%, at least 90% or 100% of the cytosine in the nucleic acid is replaced with a modified cytosine (e.g., a 5-substituted cytosine). The modified cytosine can be replaced by a compound having a single unique structure, or can be replaced by a plurality of compounds having different structures (e.g., 2, 3, 4 or more unique structures).

### Quantification of Expressed Polynucleotides Encoding Metabolic Reprogramming Molecules

[1581] In some embodiments, the polynucleotides of the present invention (e.g., a polynucleotide comprising a nucleotide sequence encoding a metabolic reprogramming molecule polypeptide), their expression products, as well as degradation products and metabolites can be quantified according to methods known in the art.

[1582] In some embodiments, the polynucleotides of the present invention can be quantified in exosomes or when derived from one or more bodily fluid. As used herein “bodily fluids” include peripheral blood, serum, plasma, ascites, urine, cerebrospinal fluid (CSF), sputum, saliva, bone marrow, synovial fluid, aqueous humor, amniotic fluid, cerumen, breast milk, broncheoalveolar lavage fluid, semen, prostatic fluid, cowper's fluid or pre-ejaculatory fluid, sweat, fecal matter, hair, tears, cyst fluid, pleural and peritoneal fluid, pericardial fluid, lymph, chyme, chyle, bile, interstitial fluid, menses, pus, sebum, vomit, vaginal secretions, mucosal secretion, stool water, pancreatic juice, lavage fluids from sinus cavities, bronchopulmonary aspirates, blastocyl cavity fluid, and umbilical cord blood. Alternatively, exosomes can be retrieved from an organ selected from the group consisting of lung, heart, pancreas, stomach, intestine, bladder, kidney, ovary, testis, skin, colon, breast, prostate, brain, esophagus, liver, and placenta.

[1583] In the exosome quantification method, a sample of not more than 2 mL is obtained from the subject and the exosomes isolated by size exclusion chromatography, density gradient centrifugation, differential centrifugation, nanomembrane ultrafiltration, immunoabsorbent capture, affinity purification, microfluidic separation, or combinations thereof. In the analysis, the level or concentration of a polynucleotide can be an expression level, presence, absence, truncation or alteration of the administered construct. It is advantageous to correlate the level with one or more clinical phenotypes or with an assay for a human disease biomarker.

[1584] The assay can be performed using construct specific probes, cytometry, qRT-PCR, real-time PCR, PCR, flow cytometry, electrophoresis, mass spectrometry, or combinations thereof while the exosomes can be isolated using immunohistochemical methods such as enzyme linked immunosorbent assay (ELISA) methods. Exosomes can also be isolated by size exclusion chromatography, density gradient centrifugation, differential centrifugation, nanomembrane ultrafiltration, immunoabsorbent capture, affinity purification, microfluidic separation, or combinations thereof.

[1585] These methods afford the investigator the ability to monitor, in real time, the level of polynucleotides remaining or delivered. This is possible because the polynucleotides of the present invention differ from the endogenous forms due to the structural or chemical modifications.

[1586] In some embodiments, the polynucleotide can be quantified using methods such as, but not limited to, ultraviolet visible spectroscopy (UV/Vis). A non-limiting example of a UV/Vis spectrometer is a NANODROP® spectrometer (ThermoFisher, Waltham, MA). The quantified polynucleotide can be analyzed in order to determine if the polynucleotide can be of proper size, check that no degradation of the polynucleotide has occurred. Degradation of the polynucleotide can be checked by methods such as, but not limited to, agarose gel electrophoresis, HPLC based purification methods such as, but not limited to, strong anion exchange HPLC, weak anion exchange HPLC, reverse phase HPLC (RP-HPLC), and hydrophobic interaction HPLC (HIC-HPLC), liquid chromatography-mass spectrometry (LCMS), capillary electrophoresis (CE) and capillary gel electrophoresis (CGE).

### Pharmaceutical Compositions

[1587] The present disclosure provides pharmaceutical formulations comprising any of the LNP compositions disclosed herein, e.g., an LNP composition comprising a polynucleotide comprising an mRNA encoding (i) a metabolic reprogramming molecule, e.g., an IDO molecule; a TDO molecule, or a combination thereof and (ii) a membrane anchoring moiety.

[1588] In some embodiments, the composition or formulation can contain a polynucleotide comprising a sequence optimized nucleic acid sequence disclosed herein which encodes a metabolic reprogramming molecule polypeptide and a membrane anchoring moiety. In some embodiments, the composition or formulation can contain a polynucleotide (e.g., a RNA, e.g., an mRNA) comprising a polynucleotide (e.g., an ORF) having significant sequence identity to a sequence optimized nucleic acid sequence disclosed herein which encodes a metabolic reprogramming molecule polypeptide and a membrane anchoring moiety. In some embodiments, the polynucleotide further comprises a miRNA binding site, e.g., a miRNA binding site that binds miR-126, miR-142, miR-144, miR-146, miR-150, miR-155, miR-16, miR-21, miR-223, miR-24, miR-27 and miR-26a.

[1589] In some embodiments of the disclosure, the polynucleotides are formulated in compositions and complexes in combination with one or more pharmaceutically acceptable excipients. Pharmaceutical compositions can optionally comprise one or more additional active substances, e.g. therapeutically and/or prophylactically active substances. Pharmaceutical compositions of the present disclosure can be sterile and/or pyrogen-free. General considerations in the formulation and/or manufacture of pharmaceutical agents can be found, for example, in Remington: The Science and Practice of Pharmacy 21st ed., Lippincott Williams & Wilkins, 2005.

[1590] In some embodiments, compositions are administered to humans, human patients or subjects. For the purposes of the present disclosure, the phrase “active ingredient” generally refers to polynucleotides to be delivered as described herein.

[1591] Although the descriptions of pharmaceutical compositions provided herein are principally directed to pharmaceutical compositions which are suitable for administration to humans, it will be understood by the skilled artisan that such compositions are generally suitable for administration to any other animal, e.g., to non-human animals, e.g. non-human mammals. Modification of pharmaceutical compositions suitable for administration to humans in order to render the compositions suitable for administration to various animals is well understood, and the ordinarily skilled veterinary pharmacologist can design and/or perform such modification with merely ordinary, if any, experimentation. Subjects to which administration of the pharmaceutical compositions is contemplated include, but are not limited to, humans and/or other primates; mammals.

[1592] In some embodiments, the polynucleotide of the present disclosure is formulated for subcutaneous, intravenous, intraperitoneal, intramuscular, intra-articular, intra-synovial, intrasternal, intrathecal, intrahepatic, intralesional, intracranial, intraventricular, oral, inhalation spray, topical, rectal, nasal, buccal, vaginal, or implanted reservoir intramuscular, subcutaneous, or intradermal delivery. In other embodiments, the polynucleotide is formulated for subcutaneous or intravenous delivery.

[1593] Formulations of the pharmaceutical compositions described herein can be prepared by any method known or hereafter developed in the art of pharmacology. In general, such preparatory methods include the step of bringing the active ingredient into association with an excipient and/or one or more other accessory ingredients, and then, if necessary and/or desirable, dividing, shaping and/or packaging the product into a desired single- or multi-dose unit.

[1594] Relative amounts of the active ingredient, the pharmaceutically acceptable excipient, and/or any additional ingredients in a pharmaceutical composition in accordance with the disclosure will vary, depending upon the identity, size, and/or condition of the subject treated and further depending upon the route by which the composition is to be administered. By way of example, the composition can comprise between 0.1% and 100%, e.g., between 0.5% and 50%, between 1% and 30%, between 5% and 80%, or at least 80% (w/w) active ingredient.

### Formulations

[1595] The polynucleotide comprising an mRNA encoding a metabolic reprograming molecule, of the disclosure can be formulated using one or more excipients.

[1596] The present invention provides pharmaceutical formulations that comprise a polynucleotide described herein (e.g., a polynucleotide comprising a nucleotide sequence encoding a metabolic reprogramming molecule polypeptide and a membrane anchoring moiety). The polynucleotides described herein can be formulated using one or more excipients to: (1) increase stability; (2) increase cell transfection; (3) permit the sustained or delayed release (e.g., from a depot formulation of the polynucleotide); (4) alter the biodistribution (e.g., target the polynucleotide to specific tissues or cell types); (5) increase the translation of encoded protein in vivo; and/or (6) alter the release profile of encoded protein in vivo. In some embodiments, the pharmaceutical formulation further comprises a delivery agent comprising, e.g., a compound having the Formula (I); or a compound having the Formula (III), (IV), (V), or (VI), or any combination thereof. In some embodiments, the delivery agent comprises an ionizable amino lipid, a helper lipid (e.g., DSPC), a sterol (e.g., Cholesterol), and a PEG lipid (e.g., PEG-DMG), e.g., with a mole ratio in the range of about (i) 40-50 mol % ionizable amino lipid, optionally 45-50 mol % ionizable amino lipid, for example, 45-46 mol %, 46-47 mol %, 47-48 mol %, 48-49 mol %, or 49-50 mol % for example about 45 mol %, 45.5 mol %, 46 mol %, 46.5 mol %, 47 mol %, 47.5 mol %, 48 mol %, 48.5 mol %, 49 mol %, or 49.5 mol %; (ii) 30-45 mol % sterol (e.g., cholesterol), optionally 35-42 mol % sterol, for example, 30-31 mol %, 31-32 mol %, 32-33 mol %, 33-34 mol %, 35-35 mol %, 35-36 mol %, 36-37 mol %, 37-38 mol %, 38-39 mol %, or 39-40 mol %, or 40-42 mol % sterol; (iii) 5-15 mol % helper lipid (e.g., DSPC), optionally 10-15 mol % helper lipid, for example, 5-6 mol %, 6-7 mol %, 7-8 mol %, 8-9 mol %, 9-10 mol %, 10-11 mol %, 11-12 mol %, 12-13 mol %, 13-14 mol %, or 14-15 mol % helper lipid; and (iv) 1-5% PEG lipid, optionally 1-5 mol % PEG lipid, for example 1.5 to 2.5 mol %, 1-2 mol %, 2-3 mol %, 3-4 mol %, or 4-5 mol % PEG lipid.

[1597] A pharmaceutically acceptable excipient, as used herein, includes, but are not limited to, any and all solvents, dispersion media, or other liquid vehicles, dispersion or suspension aids, diluents, granulating and/or dispersing agents, surface active agents, isotonic agents, thickening or emulsifying agents, preservatives, binders, lubricants or oil, coloring, sweetening or flavoring agents, stabilizers, antioxidants, antimicrobial or antifungal agents, osmolality adjusting agents, pH adjusting agents, buffers, chelants, cyoprotectants, and/or bulking agents, as suited to the particular dosage form desired. Various excipients for formulating pharmaceutical compositions and techniques for preparing the composition are known in the art (see Remington: The Science and Practice of Pharmacy, 21st Edition, A. R. Gennaro (Lippincott, Williams & Wilkins, Baltimore, MD, 2006; incorporated herein by reference in its entirety).

[1598] Exemplary diluents include, but are not limited to, calcium or sodium carbonate, calcium phosphate, calcium hydrogen phosphate, sodium phosphate, lactose, sucrose, cellulose, microcrystalline cellulose, kaolin, mannitol, sorbitol, etc., and/or combinations thereof.

[1599] Exemplary surface active agents and/or emulsifiers include, but are not limited to, natural emulsifiers (e.g., acacia, agar, alginic acid, sodium alginate, tragacanth, chondrux, cholesterol, xanthan, pectin, gelatin, egg yolk, casein, wool fat, cholesterol, wax, and lecithin), sorbitan fatty acid esters (e.g., polyoxyethylene sorbitan monooleate [TWEEN®80], sorbitan monopalmitate [SPAN®40], glyceryl monooleate, polyoxyethylene esters, polyethylene glycol fatty acid esters (e.g., CREMOPHOR®), polyoxyethylene ethers (e.g., polyoxyethylene lauryl ether [BRIJ®30]), PLUORINC®F 68, POLOXAMER®188, etc. and/or combinations thereof.

[1600] Exemplary binding agents include, but are not limited to, starch, gelatin, sugars (e.g., sucrose, glucose, dextrose, dextrin, molasses, lactose, lactitol, mannitol), amino acids (e.g., glycine), natural and synthetic gums (e.g., acacia, sodium alginate), ethylcellulose, hydroxyethylcellulose, hydroxypropyl methylcellulose, etc., and combinations thereof.

[1601] Oxidation is a potential degradation pathway for mRNA, especially for liquid mRNA Formulations. In order to prevent oxidation, antioxidants can be added to the Formulations.

[1602] Exemplary antioxidants include, but are not limited to, alpha tocopherol, ascorbic acid, ascorbyl palmitate, benzyl alcohol, butylated hydroxyanisole, m-cresol, methionine, butylated hydroxytoluene, monothioglycerol, sodium or potassium metabisulfite, propionic acid, propyl gallate, sodium ascorbate, etc., and combinations thereof.

[1603] Exemplary chelating agents include, but are not limited to, ethylenediaminetetraacetic acid (EDTA), citric acid monohydrate, disodium edetate, fumaric acid, malic acid, phosphoric acid, sodium edetate, tartaric acid, trisodium edetate, etc., and combinations thereof.

[1604] Exemplary antimicrobial or antifungal agents include, but are not limited to, benzalkonium chloride, benzethonium chloride, methyl paraben, ethyl paraben, propyl paraben, butyl paraben, benzoic acid, hydroxybenzoic acid, potassium or sodium benzoate, potassium or sodium sorbate, sodium propionate, sorbic acid, etc., and combinations thereof.

[1605] Exemplary preservatives include, but are not limited to, vitamin A, vitamin C, vitamin E, beta-carotene, citric acid, ascorbic acid, butylated hydroxyanisol, ethylenediamine, sodium lauryl sulfate (SLS), sodium lauryl ether sulfate (SLES), etc., and combinations thereof.

[1606] In some embodiments, the pH of polynucleotide solutions is maintained between pH 5 and pH 8 to improve stability. Exemplary buffers to control pH can include, but are not limited to sodium phosphate, sodium citrate, sodium succinate, histidine (or histidine-HCl), sodium malate, sodium carbonate, etc., and/or combinations thereof.

[1607] Exemplary lubricating agents include, but are not limited to, magnesium stearate, calcium stearate, stearic acid, silica, talc, malt, hydrogenated vegetable oils, polyethylene glycol, sodium benzoate, sodium or magnesium lauryl sulfate, etc., and combinations thereof.

[1608] The pharmaceutical composition or Formulation described here can contain a cryoprotectant to stabilize a polynucleotide described herein during freezing. Exemplary cryoprotectants include, but are not limited to mannitol, sucrose, trehalose, lactose, glycerol, dextrose, etc., and combinations thereof.

[1609] The pharmaceutical composition or formulation described here can contain a bulking agent in lyophilized polynucleotide formulations to yield a “pharmaceutically elegant” cake, stabilize the lyophilized polynucleotides during long term (e.g., 36 month) storage. Exemplary bulking agents of the present invention can include, but are not limited to sucrose, trehalose, mannitol, glycine, lactose, raffinose, and combinations thereof.

[1610] In some embodiments, the pharmaceutical composition or Formulation further comprises a delivery agent. The delivery agent of the present disclosure can include, without limitation, liposomes, lipid nanoparticles, lipidoids, polymers, lipoplexes, microvesicles, exosomes, peptides, proteins, cells transfected with polynucleotides, hyaluronidase, nanoparticle mimics, nanotubes, conjugates, and combinations thereof.

[1611] Formulations of the disclosure can include one or more excipients, each in an amount that together increases the stability of the polynucleotide, increases cell transfection by the polynucleotide, increases the expression of polynucleotides encoded protein, and/or alters the release profile of polynucleotide encoded proteins. Further, the polynucleotides of the present disclosure can be formulated using self-assembled nucleic acid nanoparticles.

[1612] Formulations of the pharmaceutical compositions described herein can be prepared by any method known or hereafter developed in the art of pharmacology. In general, such preparatory methods include the step of associating the active ingredient with an excipient and/or one or more other accessory ingredients.

[1613] A pharmaceutical composition in accordance with the present disclosure can be prepared, packaged, and/or sold in bulk, as a single unit dose, and/or as a plurality of single unit doses. As used herein, a “unit dose” refers to a discrete amount of the pharmaceutical composition comprising a predetermined amount of the active ingredient. The amount of the active ingredient is generally equal to the dosage of the active ingredient which would be administered to a subject and/or a convenient fraction of such a dosage such as, for example, one-half or one-third of such a dosage.

[1614] Relative amounts of the active ingredient, the pharmaceutically acceptable excipient, and/or any additional ingredients in a pharmaceutical composition in accordance with the present disclosure can vary, depending upon the identity, size, and/or condition of the subject being treated and further depending upon the route by which the composition is to be administered. For example, the composition can comprise between 0.1% and 99% (w/w) of the active ingredient. By way of example, the composition can comprise between 0.1% and 100%, e.g., between 0.5 and 50%, between 1-30%, between 5-80%, at least 80% (w/w) active ingredient.

[1615] In some embodiments, the formulations described herein contain at least one polynucleotide. As a non-limiting example, the formulations contain 1, 2, 3, 4, or 5 polynucleotides.

[1616] The use of a conventional excipient medium can be contemplated within the scope of the present disclosure, except insofar as any conventional excipient medium can be incompatible with a substance or its derivatives, such as by producing any undesirable biological effect or otherwise interacting in a deleterious manner with any other component(s) of the pharmaceutical composition.

[1617] In some embodiments, the particle size of the lipid nanoparticle is increased and/or decreased. The change in particle size can be able to help counter biological reaction such as, but not limited to, inflammation or can increase the biological effect of the modified mRNA delivered to mammals.

[1618] Pharmaceutically acceptable excipients used in the manufacture of pharmaceutical compositions include, but are not limited to, inert diluents, surface active agents and/or emulsifiers, preservatives, buffering agents, lubricating agents, and/or oils. Such excipients can optionally be included in the pharmaceutical formulations of the disclosure.

[1619] In some embodiments, the polynucleotides is administered in or with, formulated in or delivered with nanostructures that can sequester molecules such as cholesterol. Non-limiting examples of these nanostructures and methods of making these nanostructures are described in US Patent Publication No. US20130195759. Exemplary structures of these nanostructures are shown in US Patent Publication No. US20130195759, and can include a core and a shell surrounding the core.

### Equivalents and Scope

[1620] Those skilled in the art will recognize, or be able to ascertain using no more than routine experimentation, many equivalents to the specific embodiments in accordance with the disclosure described herein. The scope of the present disclosure is not intended to be limited to the Description below, but rather is as set forth in the appended claims.

[1621] In the claims, articles such as “a,” “an,” and “the” may mean one or more than one unless indicated to the contrary or otherwise evident from the context. Claims or descriptions that include “or” between one or more members of a group are considered satisfied if one, more than one, or all of the group members are present in, employed in, or otherwise relevant to a given product or process unless indicated to the contrary or otherwise evident from the context. The disclosure includes embodiments in which exactly one member of the group is present in, employed in, or otherwise relevant to a given product or process. The disclosure includes embodiments in which more than one, or all of the group members are present in, employed in, or otherwise relevant to a given product or process.

[1622] It is also noted that the term “comprising” is intended to be open and permits but does not require the inclusion of additional elements or steps. When the term “comprising” is used herein, the term “consisting of” is thus also encompassed and disclosed.

[1623] Where ranges are given, endpoints are included. Furthermore, it is to be understood that unless otherwise indicated or otherwise evident from the context and understanding of one of ordinary skill in the art, values that are expressed as ranges can assume any specific value or subrange within the stated ranges in different embodiments of the disclosure, to the tenth of the unit of the lower limit of the range, unless the context clearly dictates otherwise.

[1624] All cited sources, for example, references, publications, databases, database entries, and art cited herein, are incorporated into this application by reference, even if not expressly stated in the citation. In case of conflicting statements of a cited source and the instant application, the statement in the instant application shall control.

### EXAMPLES

[1625] The disclosure will be more fully understood by reference to the following examples. They should not, however, be construed as limiting the scope of the disclosure. It is understood that the examples and embodiments described herein are for illustrative purposes only and that various modifications or changes in light thereof will be suggested to persons skilled in the art and are to be included within the spirit and purview of this application and scope of the appended claims.

Table of contents for Examples

| | |
|---|---|
| Example 1 | Anchored IDO and TDO exhibit |
| | prolonged bioactivity in Hela cells |
| Example 2 | Anchored IDO and TDO exhibit |
| | prolonged expression in vitro |
| Example 3 | Anchored IDO and TDO exhibit |
| | increased expression and function |
| | in vivo |
| Example 4 | Experimental autoimmune |
| | encephalomyelitis (EAE) |
| Example 5 | Acute Graft Versus Host Disease |
| | (aGVHD) |
| Example 6 | Rat Collagen-Induced Arthritis |
| | (CIA ) |
| Example 7 | Expression and Bioactivity of |
| | Anchored IDO LNPs Non-human |
| | Primates (NHP) |
| Example 8 | Comparison of different LNP |
| | formulations in Non-human |
| | Primates (NHP) |
| Example 9 | IDO expression, bioactivity, and |
| | increase in splenic regulatory T |
| | cells over time |
| Example 10 | Making a polynucleotide |
| | comprising a stable tail |
| Example 11 | Production of LNP compositions |

### Example 1: Anchored IDO and TDO Exhibit Prolonged Bioactivity in Hela Cells

[1626] This example describes the bioactivity of various IDO and TDO constructs in Hela cells.

[1627] Briefly, Hela cells were transfected with IDO and TDO constructs at various concentrations in 96-well plates. After 16 hours medium was replaced with assay medium. 24 hours later, bioactivity was assessed using the IDO1 Cell-Based Assay Kit (BPS bioscience).

[1628] As shown in FIGS. 1 and 2, anchored IDO and TDO exhibited increased bioactivity compared to unanchored IDO and TDO.

### Example 2: Anchored IDO and TDO Exhibit Prolonged Expression In Vitro

[1629] This example describes the expression of various IDO constructs in RAWs and JAWsii cell lines.

### (i) RAWs Cells

### 6-72 Hour Time Course

[1630] Briefly, on day -1, 250,000 RAW cells were seeded in 24-well plates in growth media (DMEM+10% FBS). On day zero, cells were treated with 250 ng LNPs comprising various IDO or TDO constructs. Cells and supernatants were harvested at 6, 24, 48, and 72 hours and cells pelleted and frozen for further analysis by western blot analysis.

### 72-120 Hour Time Course

[1631] 250,000 RAWs cells were seeded in 24-well plates on day 1. On day 2, cells were treated with 250 ng LNPs comprising various IDO constructs. On day 4, supernatant was harvested and media replaced. On day 5, supernatant for the 72-hour time point was collected and the media was replaced. On day 6, supernatant for the 96-hour time point was collected and the media was replaced. On day 7, supernatant was harvested for the 120-hour time point. At each time point, cells pelleted and frozen for further analysis by western blot analysis.

[1632] As shown in FIGS. 3-6, prolonged expression of human anchored IDO and TDO constructs was observed out to 72 hours (IDO and TDO) and 96 hours (IDO), longer than unanchored IDO or TDO.

### (ii) JAWsii Cells

[1633] 250,000 JAWsii were seeded on day -1 in 24-well plates in complete RPMI. On day zero, cells were treated with 250 ng LNP comprising various IDO constructs. Cells and supernatants were harvested at 6, 24, 48, and 72 hours. Cells were pelleted and frozen for further analysis.

[1634] Western blotting was performed using anti-human (Rb) IDO, anti-mouse (Rb) IDO, and anti-mouse HSP90 antibodies.

[1635] As shown in FIG. 7, prolonged expression of human anchored IDO constructs (srcIDO and rasIDO) was detected at 48 hours at higher levels than unanchored human IDO, dead IDO, and the no LNP control.

| Sequence | |
|---|---|
| information | Sequence |
| Dead IDO | MAHAMENSWTISKEYHIDEEVGFALPNPQENLPDFYNDWMFIAKHL |
| amino acid, | PDLIESGQLRERVEKLNMLSIDHLTDHKSQRLARLVLGCITMAYVW |
| Variant 1 | GKGHGDVRKVLPRNIAVPYCQLSKKLELPPILVYADCVLANWKKKD |
| (SEQ ID NO: | PNKPLTYENMDVLFSFRDGDCSKGFFLVSLLVEIAAASAIKVIPTV |
| 700) | FKAMQMQERDTLLKALLEIASCLEKALQVFHQIHDHVNPKAAFSVL |
| | RIYLSGWKGNPQLSDGLVYEGFWEDPKEFAGGSAGQSSVFQCFDVL |
| | LGIQQTAGGGHAAQFLQDMRRYMPPAHRNFLCSLESNPSVREFVLS |
| | KGDAGLREAYDACVKALVSLRSYHLQIVTKYILIPASQQPKENKTS |
| | EDPSKLEAKGTGGTDLMNFLKTVRSTTEKSLLKEG |
| Dead IDO | AUGGCCCACGCCAUGGAGAACAGCUGGACCAUCAGCAAGGAGU |
| nucleotide 1, | ACCACAUCGACGAGGAGGUGGGCUUCGCCCUGCCUAACCCUCAG |
| Variant 1 | GAGAACCUGCCUGACUUCUACAACGACUGGAUGUUCAUCGCCA |
| (SEQ ID NO: | AGCACCUGCCAGACCUGAUCGAGAGCGGCCAGCUGAGAGAGAG |
| 701) | AGUGGAGAAGCUGAACAUGCUGAGCAUCGACCACCUGACCGAC |
| | CACAAGAGCCAGAGACUGGCCAGACUGGUGCUGGGCUGCAUCA |
| | CCAUGGCCUACGUGUGGGGCAAGGGCCACGGCGACGUGAGAAA |
| | GGUGCUGCCUAGAAACAUCGCCGUGCCUUACUGCCAGCUGAGC |
| | AAGAAGCUGGAGCUGCCUCCUAUCCUGGUGUACGCCGACUGCG |
| | UGCUGGCCAACUGGAAGAAGAAGGACCCUAACAAGCCUCUGAC |
| | CUACGAGAACAUGGACGUGCUGUUCAGCUUCAGAGACGGCGAC |
| | UGCAGCAAGGGCUUCUUCCUGGUGAGCCUGCUGGUGGAGAUCG |
| | CCGCCGCCAGCGCCAUCAAGGUGAUCCCUACCGUGUUCAAGGCC |
| | AUGCAGAUGCAGGAGAGAGACACCCUGCUGAAGGCCCUGCUGG |
| | AAAUCGCCAGCUGCCUGGAGAAGGCGCUGCAGGUGUUCCACCA |
| | GAUCCACGACCACGUGAACCCUAAGGCCGCCUUCAGCGUGCUGA |
| | GAAUCUACCUGAGCGGCUGGAAGGGCAACCCUCAGCUGAGCGA |
| | CGGUCUAGUCUACGAGGGCUUCUGGGAGGACCCUAAGGAGUUC |
| | GCUGGUGGCUCCGCCGGUCAGAGCAGCGUGUUCCAGUGCUUCG |
| | ACGUGCUGCUGGGCAUCCAACAGACUGCCGGUGGUGGCCACGC |
| | CGCCCAGUUCCUGCAGGACAUGAGAAGAUACAUGCCUCCUGCCC |
| | ACAGAAACUUCCUGUGCAGCCUGGAGAGCAACCCUAGCGUGAG |
| | AGAGUUCGUGCUGAGCAAGGGCGACGCCGGCCUGAGAGAGGCC |
| | UACGACGCCUGCGUGAAGGCGCUGGUGUCCCUGAGAAGCUACC |
| | ACCUGCAGAUCGUGACCAAGUACAUCCUGAUCCCUGCCAGCCAG |
| | CAGCCUAAGGAGAACAAGACCAGCGAGGACCCUAGCAAGCUGG |
| | AGGCCAAGGGCACCGGCGGCACCGACCUGAUGAACUUCCUGAA |
| | GACCGUGAGAAGCACCACCGAGAAGUCUCUGCUCAAGGAGGGC |
| Mouse IDO | MALSKISPTEGSRRILEDHHIDEDVGFALPHPLVELPDAYSPWVLVAR |
| amino acid, | NLPVLIENGQLREEVEKLPTLSTDGLRGHRLQRLAHLALGYITMAYV |
| Variant 1 | WNRGDDDVRKVLPRNIAVPYCELSEKLGLPPILSYADCVLANWKKKD |
| (SEQ ID NO: | PNGPMTYENMDILFSFPGGDCDKGFFLVSLLVEIAASPAIKAIPTVSS |
| 702) | AVERQDLKALEKALHDIATSLEKAKEIFKRMRDFVDPDTFFHVLRIY |
| | LSGWKCSSKLPEGLLYEGVWDTPKMFSGGSAGQSSIFQSLDVLLGIK |
| | HEAGKESPAEFLQEMREYMPPAHRNFLFFLESAPPVREFVISRHNEDL |
| | TKAYNECVNGLVSVRKFHLAIVDTYIMKPSKKKPTDGDKSEEPSNVE |
| | SRGTGGTNPMTFLRSVKDTTEKALLSWP |
| Mouse IDO | AUGGCCCUAAGCAAGAUCAGCCCUACCGAGGGCAGCAGAAGAA |
| nucleotide 1, | UCCUUGAGGACCACCACAUCGACGAGGACGUGGGCUUCGCCUU |
| Variant 1 | GCCUCACCCUCUUGUGGAGUUGCCGGACGCCUACAGCCCUUGGG |
| (SEQ ID NO: | UGCUUGUGGCCAGAAACCUUCCUGUGCUGAUCGAGAACGGCCA |
| 703) | GCUGAGAGAGGAGGUGGAGAAGCUGCCUACUCUGAGUACCGAC |
| | GGCCUGAGAGGCCACAGACUGCAGAGACUGGCCCACCUGGCCCU |
| | GGGCUACAUCACCAUGGCCUACGUGUGGAACAGAGGCGACGAC |
| | GACGUGAGAAAGGUGCUGCCUAGAAACAUCGCCGUGCCUUACU |
| | GCGAGCUGAGCGAGAAGCUCGGCCUGCCUCCUAUCCUGAGCUA |
| | CGCCGACUGCGUGCUGGCCAACUGGAAGAAGAAGGACCCUAAC |
| | GGCCCUAUGACCUACGAGAACAUGGACAUCCUGUUCAGCUUCC |
| | CUGGCGGCGACUGCGACAAGGGCUUCUUCCUGGUGAGCCUCCU |
| | GGUGGAAAUCGCCGCCAGCCCUGCCAUCAAGGCCAUCCCUACCG |
| | UGAGCAGCGCCGUGGAGAGACAGGACCUGAAGGCCCUGGAGAA |
| | GGCACUCCACGACAUCGCCACCAGUCUCGAGAAGGCUAAGGAG |
| | AUCUUCAAGAGAAUGAGAGACUUCGUGGACCCUGACACCUUCU |
| | UCCACGUGCUGAGAAUCUACCUGAGCGGCUGGAAGUGCAGCAG |
| | CAAGUUACCAGAGGGCCUGCUGUACGAGGGCGUGUGGGACACC |
| | CCUAAGAUGUUCAGCGGCGGUUCCGCCGGCCAGAGCAGCAUCU |
| | UCCAGAGCCUGGACGUGCUGCUGGGCAUCAAGCACGAGGCCGG |
| | CAAGGAGUCCCCUGCCGAGUUCCUGCAGGAGAUGAGAGAGUAC |
| | AUGCCUCCUGCCCACAGAAACUUCCUGUUCUUCUUGGAGAGCG |
| | CCCCUCCUGUUCGCGAAUUCGUGAUCAGCAGACACAACGAGGA |
| | UCUCACCAAGGCCUACAACGAGUGCGUGAACGGUCUGGUGUCC |
| | GUCAGAAAGUUCCAUCUCGCAAUCGUGGACACCUACAUCAUGA |
| | AGCCUAGCAAGAAGAAGCCGACGGAUGGAGACAAGAGCGAGGA |
| | ACCGAGCAAUGUCGAAAGCAGAGGCACCGGCGGCACCAAUCCA |
| | AUGACAUUCCUGAGAAGCGUGAAGGACACCACUGAGAAGGCCC |
| | UUCUGAGCUGGCCU |

### Example 3: Anchored IDO and TDO Exhibit Increased Expression and Function In Vivo

[1636] This example describes the in vivo function of various IDO and TDO constructs in mice.

[1637] Briefly, naïve B₆ mice were injected with 0.5 mpk or 1.0 mpk of LNPs comprising various IDO or TDO constructs or 10 μg LPS intravenous. Serum, liver lysates, and/or spleens were harvested from mice at 6 or 24 hours for analysis by flow cytometry and/or KYN and TRP ELISAs.

[1638] At 24 hours, the expression of human IDO1 variant 1.2 and human TDO variant 2.10 with idT modification exhibited the highest expression (FIGS. 8 and 9).

[1639] As shown in FIG. 10, all anchored IDO exhibited increased KYN and decreased TRP at 6 hours in the serum. Similarly, anchored IDO and TDO exhibited increased KYN and decreased TRP at 24 hours in the serum (FIGS. 11 and 12).

| Sequence | |
|---|---|
| information | Sequence |
| Dead TDO2 | MSGCPFLGNNFGYTFKKLPVEGSEEDKSQTGVNRASKGGLIYGNYL |
| amino acid, | HLEKVLNAQELQSETKGNKIHDEHLFIITAQAYELWFKQILWELDSV |
| Variant 1 | REIFQNGHVRDERNMLKVVSRMHRVSVILKLLVQQFSILETMTALDF |
| (SEQ ID NO: | NDFREYLSPASGFQSLQFRLLENKIGVLQNMRVPYNRRHYRDNFKG |
| 704) | EENELLLKSEQEKTLLELVEAWLERTPGLEPHGFNFWGKLEKNITRG |
| | LEEEFIRIQAKEESEEKEEQVAEFQKQKEVLLSLFDEKRHEHLLSKGE |
| | RRLSYRALQGALMIYFYREEPRFQVPFQLLTSLMDIDSLMTKWRYN |
| | HVCMVHRMLGSKAGTGGSSGYHYLRSTVSDRYKVFVDLFNLSTYLI |
| | PRHWIPKMNPTIHKFLYTAEYCDSSYFSSDESD |
| Dead TDO2 | AUGAGCGGCUGCCCUUUCCUGGGCAACAACUUCGGCUACACCU |
| nucleotide 1, | UCAAGAAGCUGCCUGUGGAGGGCAGCGAGGAGGACAAGAGCCA |
| Variant 1 | GACCGGCGUGAACAGAGCCAGCAAGGGCGGCCUGAUCUACGGC |
| (SEQ ID NO: | AACUACCUGCACCUGGAGAAGGUGCUGAACGCCCAGGAGCUGC |
| 705) | AGAGCGAGACAAAGGGAAACAAGAUCCACGACGAGCACCUGUU |
| | CAUCAUCACCGCCCAGGCCUACGAGCUGUGGUUCAAGCAGAUCC |
| | UGUGGGAGCUGGACAGCGUGAGAGAGAUCUUCCAGAACGGCCA |
| | CGUACGGGACGAGAGAAACAUGCUGAAGGUGGUGAGCAGAAUG |
| | CACAGAGUGAGCGUGAUCCUGAAGCUGCUGGUGCAGCAGUUCA |
| | GCAUCCUGGAAACAAUGACCGCCCUGGACUUCAACGACUUCAG |
| | AGAGUACCUGAGCCCUGCCAGCGGCUUCCAGAGCCUCCAGUUCA |
| | GACUGCUGGAGAACAAGAUAGGCGUGCUGCAGAACAUGAGAGU |
| | GCCUUACAACAGAAGACACUACAGAGACAACUUCAAGGGCGAG |
| | GAGAACGAGCUGCUGCUCAAGAGCGAGCAGGAGAAGACCUUGC |
| | UUGAACUGGUGGAGGCCUGGCUGGAGAGAACCCCUGGCCUGGA |
| | GCCUCACGGCUUCAACUUCUGGGGCAAGUUGGAGAAGAACAUC |
| | ACCCGCGGUUUAGAAGAAGAGUUCAUCAGAAUCCAGGCCAAGG |
| | AGGAAUCCGAGGAGAAGGAGGAGCAGGUGGCCGAGUUCCAGAA |
| | GCAGAAGGAGGUGCUCCUAAGCCUGUUCGACGAGAAGAGACAC |
| | GAACAUCUCUUGUCCAAGGGAGAGAGAAGACUGAGCUAUCGCG |
| | CCCUGCAAGGAGCCCUGAUGAUCUACUUCUACCGUGAGGAGCC |
| | UAGAUUCCAGGUGCCUUUCCAGCUGCUGACCAGCCUGAUGGAC |
| | AUCGAUUCCCUUAUGACCAAGUGGAGAUACAACCACGUGUGCA |
| | UGGUGCACAGAAUGCUGGGCAGCAAGGCCGGCACCGGCGGCAG |
| | CAGCGGCUACCACUACCUGAGAAGCACCGUGAGCGACAGAUAC |
| | AAGGUGUUCGUGGACUUGUUCAACCUGAGCACCUACCUGAUCC |
| | CUAGACACUGGAUCCCUAAGAUGAACCCUACCAUCCACAAGUU |
| | CCUGUACACCGCCGAGUACUGCGACAGCAGCUACUUCAGCAGCG |
| | ACGAGAGCGAC |

### Example 4: Experimental Autoimmune Encephalomyelitis (EAE)

[1640] This example describes the effects of administration of LNPs comprising mRNA encoding IDO on the onset and severity of experimental autoimmune encephalomyelitis (EAE).

[1641] Briefly, B₆ mice were treated with MOG (35-55) emulsified in complete Freund's adjuvant (CFA) subcutaneously (SC) on day 1 and pertussis toxin intraperitoneally (IP) on each of days 1 and 3. The MOG/CFA causes an expansion of MOG-specific autoimmune T cells that expand and differentiate and induce disease.

[1642] Mice were subsequently injected with LNPs comprising mRNA encoding IDO at day -1 and day 6 post MOG administration.

[1643] Animals were scored for development of paralysis overtime to indicate disease severity according to the following scores:
[1644] Score 1—Limp tail
[1645] Score 2—partial hind leg paralysis
[1646] Score 3—complete hind leg paralysis
[1647] Score 4—complete hind and partial front leg paralysis
[1648] Score 5—moribund

[1649] As shown in FIG. 13, administration of LNP formulated IDO1 mRNA reduced EAE disease induction and severity as compared to vehicle and enzymatically dead IDO controls.

### Example 5: Acute Graft Versus Host Disease (aGVHD)

[1650] This example describes the effects of administration of LNPs comprising mRNA encoding IDO on the onset, progression, and severity of acute graft versus host disease (aGVHD).

[1651] Briefly, B6/DBA F1 mice were injected with 50M splenocytes from B6 mice intravenously (IV) on day zero. Mice were treated with LNP IV on days 0 and 7. On day 7, mice were bled for serum and flow analysis. On day 14 mice were euthanized and extensive flow analysis was performed on the spleen.

[1652] B6/DBA F1 recipient mice have DBA-MHC molecules that activate donor T cells. The expansion and differentiation of these cells drives aGVD. The hallmarks of disease are the expansion of donor CD8 T cells and a depletion of the host B cells.

[1653] As shown in FIG. 14, DO treatment reduced expansion of donor CD8 T cells and reduced killing of host CD19 cells on day 7. Mice treated with DO retained host B cell percentages and total numbers on day 14, compared to untreated, vehicle, and enzymatically dead IDO controls (FIG. 15). DO treatment also increased the number of T regs within host and donor populations (FIG. 16) and reduced proliferation of donor CDt+ and CD8+ T cells (FIG. 17).

| Sequence | |
|---|---|
| information | Sequence |
| Dead Human | MGSSKSKPKDPSQRRRGGGSAHAMENSWTISKEYHIDEEVGFALPNP |
| anchored | QENLPDFYNDWMFIAKHLPDLIESGQLRERVEKLNMLSIDHLTDHKS |
| IDO1, amino | QRLARLVLGCITMAYVWGKGHGDVRKVLPRNIAVPYCQLSKKLELP |
| acid, variant 1 | PILVYADCVLANWKKKDPNKPLTYENMDVLFSFRDGDCSKGFFLVS |
| (SEQ ID NO: | LLVEIAAASAIKVIPTVFKAMQMQERDTLLKALLEIASCLEKALQVF |
| 706) | HQIHDHVNPKAAFSVLRIYLSGWKGNPQLSDGLVYEGFWEDPKEFA |
| | GGSAGQSSVFQCFDVLLGIQQTAGGGHAAQFLQDMRRYMPPAHRNF |
| | LCSLESNPSVREFVLSKGDAGLREAYDACVKALVSLRSYHLQIVTK |
| | YILIPASQQPKENKTSEDPSKLEAKGTGGTDLMNFLKTVRSTTEKS |
| | LLKEGGKPIPNPLLGLDST |
| Dead Human | AUGGGGUCGUCGAAGUCGAAGCCGAAAGAUCCUAGUCAGCGCA |
| anchored | GGAGGGGAGGAGGAUCCGCCCACGCCAUGGAGAACAGCUGGAC |
| IDO1, amino | CAUCAGCAAGGAGUACCACAUCGACGAGGAGGUGGGCUUCGCC |
| acid, variant 1 | CUGCCCAACCCACAGGAGAACCUGCCCGACUUCUACAACGACUG |
| (SEQ ID NO: | GAUGUUCAUCGCCAAGCACCUGCCCGACCUGAUCGAGAGCGGG |
| 707) | CAGCUGCGGGAACGGGUGGAGAAGCUGAACAUGCUGAGCAUCG |
| | ACCACCUGACCGACCACAAGUCCCAGCGGUUGGCUCGGCUGGUG |
| | CUGGGCUGCAUCACCAUGGCCUACGUGUGGGGAAAGGGGCACG |
| | GUGACGUGCGGAAGGUGCUGCCCCGCAACAUCGCCGUGCCCUAC |
| | UGCCAGCUGAGCAAGAAGCUGGAGCUGCCUCCGAUCCUGGUGU |
| | ACGCCGACUGCGUGCUGGCCAACUGGAAGAAGAAGGACCCCAA |
| | CAAGCCCCUGACCUACGAGAACAUGGACGUGCUGUUCUCCUUCC |
| | GGGACGGGGACUGCAGCAAGGGGUUCUUCCUGGUGAGCCUGCU |
| | GGUGGAGAUCGCCGCCGCCUCUGCCAUCAAGGUGAUCCCCACCG |
| | UGUUCAAGGCCAUGCAGAUGCAGGAGAGGGACACCCUGCUGAA |
| | GGCCCUGCUGGAGAUCGCCAGCUGCCUGGAGAAGGCCCUGCAG |
| | GUGUUCCACCAGAUCCACGACCACGUGAACCCCAAGGCCGCCUU |
| | CAGCGUGCUGCGCAUCUACCUGUCCGGCUGGAAGGGCAAUCCCC |
| | AGCUGAGCGACGGCCUGGUGUACGAGGGCUUCUGGGAGGACCC |
| | CAAGGAAUUUGCUGGCGGUAGCGCUGGCCAGUCCAGCGUGUUC |
| | CAGUGCUUCGACGUGCUGCUGGGCAUUCAGCAAACCGCUGGAG |
| | GCGGACACGCUGCCCAGUUCCUGCAGGACAUGCGGCGGUACAU |
| | GCCACCGGCCCACCGCAACUUCCUGUGCUCCCUGGAGAGCAACC |
| | CCUCCGUGCGGGAGUUCGUGCUGUCCAAGGGCGACGCCGGACU |
| | GAGGGAGGCCUACGACGCCUGCGUGAAGGCCCUGGUGUCCCUG |
| | CGCAGCUACCACCUGCAGAUCGUGACCAAGUACAUCCUGAUCCC |
| | CGCAAGCCAGCAGCCCAAGGAGAACAAGACCAGCGAGGACCCCU |
| | CCAAGCUGGAAGCUAAGGGCACCGGCGGCACUGACCUGAUGAA |
| | CUUCCUGAAGACCGUGCGGAGCACCACCGAGAAGAGCCUGCUG |
| | AAGGAGGGCGGGAAGCCGAUCCCGAAUCCCCUCCUCGGGCUCG |
| | ACUCGACG |

### Example 6: Rat Collagen-Induced Arthritis (CIA)

[1654] This example describes the effects of administration of LNPs comprising mRNA encoding IDO on the onset, progression, and severity of disease in a rat collagen-induced arthritis (CIA) model.

[1655] Briefly, Sprague Dawley (SD) Rats are injected with collagen emulsified in incomplete Freund's adjuvant (IFA) on day zero and develop CIA within 10-12 days. Disease severity is determined by the scoring of each ankle/wrist. The score for each legs is then summed for the disease score (max 16). Rats are dosed at 0.5 mpk IV on days 0, 7 and 14 with LNPs comprising mRNA encoding IDO.

[1656] As shown in FIG. 30, treatment with IDO reduces the severity of disease score in after rat CIA induction.

### Example 7: Expression and Bioactivity of Anchored IDO LNPs Non-Human Primates (NHP)

[1657] This example describes the impact of idT modifications on bioactivity and expression of IDO in the serum and peripheral blood mononuclear cells (PBMCs) of non-human primates (NHPs).

[1658] Briefly, cynomolgus monkeys were administered LNPs comprising various IDO constructs at 0.3 mg/kg or 1 mg/kg intravenously on day 0. Samples including serum and PBMCs were collected on day -14, day -7, day 0, 6 hours, 12 hours, 24 hours, day 5, day 8, day 11, and day 14 post administration.

[1659] PBMCs were isolated using a Leucosep and Ficoll density gradient. Following isolation, PBMCs were cryopreserved for further analysis. Serum was recovered from whole blood following clotting of whole blood and centrifugation. Serum samples were cryopreserved for further analysis.

[1660] As shown in FIGS. 18-20, idT modification increased expression of IDO in both monocytes and dendritic cells (DCs). Similarly, idT modification also increased IDO expression in both CD4+ and CD8+ T cells (FIG. 21), NK and NK T cells (FIG. 22), and B cells (FIG. 23).

[1661] As shown in FIG. 24, a dose dependent increase in the kynurenine: tryptophan (KYN:TRP) ratio was observed following administration of IDO; which further increased with idT modification.

[1662] Overall, IDO expression and bioactivity was dose dependent. idT modification further enhances IDO expression and bioactivity in the blood.

### Example 8: Comparison of Different LNP Formulations in Non-Human Primates (NHP)

[1663] This example describes the impact of different LNP formulations on the bioactivity and expression of IDO in the serum and PBMCs of NHPs after a single dose.

[1664] Briefly, cynomolgus monkeys were administered LNPs comprising various IDO constructs at 0.3 mg/kg or 1 mg/kg intravenously on day 0. Samples including serum and PBMCs were collected on day -14, day -7, day 0, 6 hours, 12 hours, 24 hours, day 5, day 8, day 11, and day 14 post administration.

[1665] PBMCs were isolated using a Leucosep and Ficoll density gradient. Following isolation, PBMCs were cryopreserved for further analysis. Serum was recovered from whole blood following clotting of whole blood and centrifugation. Serum samples were cryopreserved for further analysis.

[1666] As shown in FIG. 25, each of the three IDO lipid formulations induced similar KYN levels. Increased KYN levels were observed in all animals following administration of IDO LNPs (FIG. 26). Similar levels of TRP depletion over time were also observed following administration of IDO LNPs (FIG. 27). As shown in FIG. 28, each of the three IDO lipid formulations induced a similar depletion of TRP. Each of the three IDO lipid formulations exhibited a similar result on the KYN:TRP ratios in serum over time (FIG. 29).

[1667] In summary, no appreciable differences in IDO bioactivity between the various LNP formulations at 0.3 mpk.

### Example 9. IDO Expression, Bioactivity, and Increase in Splenic Regulatory T Cells Over Time

[1668] This example describes the expression and bioactivity of an LNP formulated IDO construct in mice and its effect on the splenic regulatory T cells.

[1669] Briefly, naïve B6 mice were injected IV with 0.5 mpk of LNP formulated IDO or Dead IDO mRNA (control) that was idT modified.

[1670] In one experiment, at 24, 48, 72, 96, 120, or 144 hours post injection spleen and liver was harvested, weighed, and lysed. In another experiment, serum was collected at 24, 48, 72, and 96 hours post injection. In both experiments, IDO expression was measured by ELISA.

[1671] As shown in FIGS. 31 and 32, IDO expression peaked at 48 hours post LNP injection in spleen and liver and at 72 hours post LNP injection in serum.

[1672] To analyze the KYN:TRP ratios, serum or plasma was isolated from whole blood at 24, 48, 72, 96, 120, and 144 hours post injection and analyzed for KYN and TRP by ELISA. As shown in FIG. 33, IDO treatment resulted in an increase in KYN:TRP ratios out to 120 hours post LNP injection.

[1673] To analyze the effects of IDO treatment on splenic T cells, at 1, 2, 3, 4, 5, 6, 7, 8, or 9 days post injection, spleens were harvested, processed, and the percentage of Tregs was analyses by flow cytometry.

[1674] As shown in FIG. 34, treatment with IDO resulted in a statistically significant increase in Treg percentage at days 4, 5, and 6 post LNP injection.

### Example 10. Making a Polynucleotide Comprising a Stable Tail

[1675] An exemplary mRNA construct was modified by ligation to stabilize the poly(A) tail. Ligation was performed using 0.5-1.5 mg/mL mRNA (5′ Cap1, 3′ A100), 50 mM Tris-HCl pH 7.5, 10 mM MgCl2, 1 mM TCEP, 1000 units/mL T4 RNA Ligase 1, 1 mM ATP, 20% w/v polyethylene glycol 8000, and 5:1 molar ratio of modifying oligo to mRNA. Modifying oligo has a sequence of 5′-phosphate-AAAAAAAAAAAAAAAAAAAA-(inverted deoxythymidine (idT)) (SEQ ID NO: 196) (see below). Ligation reactions were mixed and incubated at room temperature (˜22° C.) for 4 h. Stable tail mRNA were purified by dT purification, reverse phase purification, hydroxyapatite purification, ultrafiltration into water, and sterile filtration. Ligation efficiency for each mRNA was >80% as assessed by UPLC separation of ligated and unligated mRNA. The resulting stable tail-containing mRNAs contained the following structure at the 3′end, starting with the polyA region: A₁₀₀-UCUAGAAAAAAAAAAAAAAAAAAAA (SEQ ID NO: 197)-inverted deoxythymidine (idT) (sequence with 3′ idT disclosed as SEQ ID NO: 198).

[1676] Modifying oligo to stabilize tail (5′-phosphate-AAAAAAAAAAAAAAAAAAAA-(inverted deoxythymidine)) (SEQ ID NO: 196) (see below):

[chemical structure]

[1677] Each of the target protein encoding mRNA constructs were transfected at a concentration of 0.1 μg/mL and protein expression was examined at 24 and 96 hours post-transfection and compared to expression resulting from transfection of a control.

### Example 11: Production of LNP Compositions

### A. Production of Nanoparticle Compositions

[1678] In order to investigate safe and efficacious nanoparticle compositions for use in the delivery of therapeutic and/or prophylactics to cells, a range of formulations are prepared and tested. Specifically, the particular elements and ratios thereof in the lipid component of nanoparticle compositions are optimized.

[1679] Nanoparticles can be made with mixing processes such as microfluidics and T-junction mixing of two fluid streams, one of which contains the therapeutic and/or prophylactic and the other has the lipid components.

[1680] Lipid compositions are prepared by combining a lipid according to Formulae (I), (I-a), (I-b), (I-c), (II), (II-a), (II-b), (II-c), (II-d), (II-e), (II-f), (II-g), (II-h), or (III)and/or any of Compounds X, Y, Z, Q or M or a non-cationic helper lipid (such as DOPE, DSPC, or oleic acid obtainable from Avanti Polar Lipids, Alabaster, AL), a PEG lipid (such as 1,2 dimyristoyl sn glycerol methoxypolyethylene glycol, also known as PEG-DMG, obtainable from Avanti Polar Lipids, Alabaster, AL), and a phytosterol (optionally including a structural lipid such as cholesterol) at concentrations of about, e.g., 50 mM in a solvent, e.g., ethanol. Solutions should be refrigeration for storage at, for example, −20° C. Lipids are combined to yield desired molar ratios (see, for example, Table 21 below) and diluted with water and ethanol to a final lipid concentration of e.g., between about 5.5 mM and about 25 mM. Phytosterol* in Table 21 refers to phytosterol or optionally a combination of phytosterol and structural lipid such as beta-phytosterol and cholesterol.

[1681] Table 21. Exemplary formulations including Compounds according to Formulae (I), (I-a), (I-b), (I-c), (II), (II-a), (II-b), (I-c), (II-d), (II-e), (II-f), (II-g), (I-h), or (III) and/or any of Compounds X, Y, Z, Q or M.

[1682] In the following Examples, Formula I-18 or Formula I-25 containing LNPs were used.

TABLE 21
Exemplary formulations of LNP compositions

| Composition | |
|---|---|
| (mol %) | Components |
| 40:20:38.5:1.5 | Compound:Phospholipid:Phytosterol*:PEG-DMG |
| 45:15:38.5:1.5 | Compound:Phospholipid:Phytosterol*:PEG-DMG |
| 50:10:38.5:1.5 | Compound:Phospholipid:Phytosterol*:PEG-DMG |
| 55:5:38.5:1.5 | Compound:Phospholipid:Phytosterol*:PEG-DMG |
| 60:5:33.5:1.5 | Compound:Phospholipid:Phytosterol*:PEG-DMG |
| 45:20:33.5:1.5 | Compound:Phospholipid:Phytosterol*:PEG-DMG |
| 50:20:28.5:1.5 | Compound:Phospholipid:Phytosterol*:PEG-DMG |
| 55:20:23.5:1.5 | Compound:Phospholipid:Phytosterol*:PEG-DMG |
| 60:20:18.5:1.5 | Compound:Phospholipid:Phytosterol*:PEG-DMG |
| 40:15:43.5:1.5 | Compound:Phospholipid:Phytosterol*:PEG-DMG |
| 50:15:33.5:1.5 | Compound:Phospholipid:Phytosterol*:PEG-DMG |
| 55:15:28.5:1.5 | Compound:Phospholipid:Phytosterol*:PEG-DMG |
| 60:15:23.5:1.5 | Compound:Phospholipid:Phytosterol*:PEG-DMG |
| 40:10:48.5:1.5 | Compound:Phospholipid:Phytosterol*:PEG-DMG |
| 45:10:43.5:1.5 | Compound:Phospholipid:Phytosterol*:PEG-DMG |
| 55:10:33.5:1.5 | Compound:Phospholipid:Phytosterol*:PEG-DMG |
| 60:10:28.5:1.5 | Compound:Phospholipid:Phytosterol*:PEG-DMG |
| 40:5:53.5:1.5 | Compound:Phospholipid:Phytosterol*:PEG-DMG |
| 45:5:48.5:1.5 | Compound:Phospholipid:Phytosterol*:PEG-DMG |
| 50:5:43.5:1.5 | Compound:Phospholipid:Phytosterol*:PEG-DMG |
| 40:20:40:0 | Compound:Phospholipid:Phytosterol*:PEG-DMG |
| 45:20:35:0 | Compound:Phospholipid:Phytosterol*:PEG-DMG |
| 50:20:30:0 | Compound:Phospholipid:Phytosterol*:PEG-DMG |
| 55:20:25:0 | Compound:Phospholipid:Phytosterol*:PEG-DMG |
| 60:20:20:0 | Compound:Phospholipid:Phytosterol*:PEG-DMG |
| 40:15:45:0 | Compound:Phospholipid:Phytosterol*:PEG-DMG |
| 45:15:40:0 | Compound:Phospholipid:Phytosterol*:PEG-DMG |
| 50:15:35:0 | Compound:Phospholipid:Phytosterol*:PEG-DMG |
| 55:15:30:0 | Compound:Phospholipid:Phytosterol*:PEG-DMG |
| 60:15:25:0 | Compound:Phospholipid:Phytosterol*:PEG-DMG |
| 40:10:50:0 | Compound:Phospholipid:Phytosterol*:PEG-DMG |
| 45:10:45:0 | Compound:Phospholipid:Phytosterol*:PEG-DMG |
| 50:0:48.5:1.5 | Compound:Phospholipid:Phytosterol*:PEG-DMG |
| 50:10:40:0 | Compound:Phospholipid:Phytosterol*:PEG-DMG |
| 55:10:35:0 | Compound:Phospholipid:Phytosterol*:PEG-DMG |
| 60:10:30:0 | Compound:Phospholipid:Phytosterol*:PEG-DMG |

[1683] Nanoparticle compositions including a therapeutic and/or prophylactic and a lipid component are prepared by combining the lipid solution with a solution including the therapeutic and/or prophylactic at lipid component to therapeutic and/or prophylactic wt:wt ratios between about 5:1 and about 50:1. The lipid solution is rapidly injected using a NanoAssemblr microfluidic based system at flow rates between about 10 ml/min and about 18 ml/min into the therapeutic and/or prophylactic solution to produce a suspension with a water to ethanol ratio between about 1:1 and about 4:1.

[1684] For nanoparticle compositions including an RNA, solutions of the RNA at concentrations of 0.1 mg/ml in deionized water are diluted in a buffer, e.g., 50 mM sodium citrate buffer at a pH between 3 and 4 to form a stock solution.

[1685] Nanoparticle compositions can be processed by dialysis to remove ethanol and achieve buffer exchange. Formulations are dialyzed twice against phosphate buffered saline (PBS), pH 7.4, at volumes 200 times that of the primary product using Slide-A-Lyzer cassettes (Thermo Fisher Scientific Inc., Rockford, IL) with a molecular weight cutoff of 10 kDa. The first dialysis is carried out at room temperature for 3 hours. The formulations are then dialyzed overnight at 4° C. The resulting nanoparticle suspension is filtered through 0.2 m sterile filters (Sarstedt, Numbrecht, Germany) into glass vials and sealed with crimp closures. Nanoparticle composition solutions of 0.01 mg/ml to 0.10 mg/ml are generally obtained.

[1686] The method described above induces nano-precipitation and particle formation. Alternative processes including, but not limited to, T-junction and direct injection, may be used to achieve the same nano-precipitation.

### B. Characterization of Nanoparticle Compositions

[1687] A Zetasizer Nano ZS (Malvern Instruments Ltd, Malvern, Worcestershire, UK) can be used to determine the particle size, the polydispersity index (PDI) and the zeta potential of the nanoparticle compositions in 1×PBS in determining particle size and 15 mM PBS in determining zeta potential.

[1688] Ultraviolet-visible spectroscopy can be used to determine the concentration of a therapeutic and/or prophylactic (e.g., RNA) in nanoparticle compositions. 100 μL of the diluted formulation in 1×PBS is added to 900 μL of a 4:1 (v/v) mixture of methanol and chloroform. After mixing, the absorbance spectrum of the solution is recorded, for example, between 230 nm and 330 nm on a DU 800 spectrophotometer (Beckman Coulter, Beckman Coulter, Inc., Brea, CA). The concentration of therapeutic and/or prophylactic in the nanoparticle composition can be calculated based on the extinction coefficient of the therapeutic and/or prophylactic used in the composition and on the difference between the absorbance at a wavelength of, for example, 260 nm and the baseline value at a wavelength of, for example, 330 nm.

[1689] For nanoparticle compositions including an RNA, a QUANT-IT™ RIBOGREEN® RNA assay (Invitrogen Corporation Carlsbad, CA) can be used to evaluate the encapsulation of an RNA by the nanoparticle composition. The samples are diluted to a concentration of approximately 5 μg/mL in a TE buffer solution (10 mM Tris-HCl, 1 mM EDTA, pH 7.5). 50 μL of the diluted samples are transferred to a polystyrene 96 well plate and either 50 μL of TE buffer or 50 μL of a 2% Triton X-100 solution is added to the wells. The plate is incubated at a temperature of 37° C. for 15 minutes. The RIBOGREEN® reagent is diluted 1:100 in TE buffer, and 100 μL of this solution is added to each well. The fluorescence intensity can be measured using a fluorescence plate reader (Wallac Victor 1420 Multilablel Counter; Perkin Elmer, Waltham, MA) at an excitation wavelength of, for example, about 480 nm and an emission wavelength of, for example, about 520 nm. The fluorescence values of the reagent blank are subtracted from that of each of the samples and the percentage of free RNA is determined by dividing the fluorescence intensity of the intact sample (without addition of Triton X-100) by the fluorescence value of the disrupted sample (caused by the addition of Triton X-100).

### C. In Vivo Formulation Studies

[1690] In order to monitor how effectively various nanoparticle compositions deliver therapeutic and/or prophylactics to targeted cells, different nanoparticle compositions including a particular therapeutic and/or prophylactic (for example, a modified or naturally occurring RNA such as an mRNA) are prepared and administered to rodent populations. Mice are intravenously, intramuscularly, subcutaneously, intraarterially, or intratumorally administered a single dose including a nanoparticle composition with a lipid nanoparticle formulation. In some instances, mice may be made to inhale doses. Dose sizes may range from 0.001 mg/kg to 10 mg/kg, where 10 mg/kg describes a dose including 10 mg of a therapeutic and/or prophylactic in a nanoparticle composition for each 1 kg of body mass of the mouse. A control composition including PBS may also be employed.

[1691] Upon administration of nanoparticle compositions to mice, dose delivery profiles, dose responses, and toxicity of particular formulations and doses thereof can be measured by enzyme-linked immunosorbent assays (ELISA), bioluminescent imaging, or other methods. For nanoparticle compositions including mRNA, time courses of protein expression can also be evaluated. Samples collected from the rodents for evaluation may include blood, sera, and tissue (for example, muscle tissue from the site of an intramuscular injection and internal tissue); sample collection may involve sacrifice of the animals.

[1692] Nanoparticle compositions including mRNA are useful in the evaluation of the efficacy and usefulness of various formulations for the delivery of therapeutic and/or prophylactics. Higher levels of protein expression induced by administration of a composition including an mRNA will be indicative of higher mRNA translation and/or nanoparticle composition mRNA delivery efficiencies. As the non-RNA components are not thought to affect translational machineries themselves, a higher level of protein expression is likely indicative of a higher efficiency of delivery of the therapeutic and/or prophylactic by a given nanoparticle composition relative to other nanoparticle compositions or the absence thereof.

### Other Embodiments

[1693] It is to be understood that while the present disclosure has been described in conjunction with the detailed description thereof, the foregoing description is intended to illustrate and not limit the scope of the present disclosure, which is defined by the scope of the appended claims. Other aspects, advantages, and alterations are within the scope of the following claims. All references described herein are incorporated by reference in their entireties.

The application's sequence listing, which the Patent Office published only in electronic form, follows.

SEQUENCE LISTING (710 sequences)

SEQ ID NO: 1 - protein, 436 aa, synthetic construct
MGSSKSKPKDPSQRRRGGGSAHAMENSWTISKEYHIDEEVGFALPNPQENLPDFYNDWMFIAKHLPDLIESGQLRERVEKLNMLSIDHLTDHKSQRLARLVLGCITMAYVWGKGHGDVRKVLPRNIAVPYCQLSKKLELPPILVYADCVLANWKKKDPNKPLTYENMDVLFSFRDGDCSKGFFLVSLLVEIAAASAIKVIPTVFKAMQMQERDTLLKALLEIASCLEKALQVFHQIHDHVNPKAFFSVLRIYLSGWKGNPQLSDGLVYEGFWEDPKEFAGGSAGQSSVFQCFDVLLGIQQTAGGGHAAQFLQDMRRYMPPAHRNFLCSLESNPSVREFVLSKGDAGLREAYDACVKALVSLRSYHLQIVTKYILIPASQQPKENKTSEDPSKLEAKGTGGTDLMNFLKTVRSTTEKSLLKEGGKPIPNPLLGLDST

SEQ ID NO: 2 - RNA, 1308 nt, synthetic construct
  source 1..1308: mol_type = other RNA
  misc_difference 2: note = uracil or N1-methylpseudouracil
  misc_difference 24: note = uracil or N1-methylpseudouracil
  misc_difference 33: note = uracil or N1-methylpseudouracil
  misc_difference 58: note = uracil or N1-methylpseudouracil
  misc_difference 71: note = uracil or N1-methylpseudouracil
  misc_difference 82: note = uracil or N1-methylpseudouracil
  misc_difference 89: note = uracil or N1-methylpseudouracil
  misc_difference 100: note = uracil or N1-methylpseudouracil
  misc_difference 107: note = uracil or N1-methylpseudouracil
  misc_difference 119: note = uracil or N1-methylpseudouracil
  misc_difference 124: note = uracil or N1-methylpseudouracil
  misc_difference 125: note = uracil or N1-methylpseudouracil
  misc_difference 131: note = uracil or N1-methylpseudouracil
  misc_difference 135: note = uracil or N1-methylpseudouracil
  misc_difference 141: note = uracil or N1-methylpseudouracil
  misc_difference 152: note = uracil or N1-methylpseudouracil
  misc_difference 156: note = uracil or N1-methylpseudouracil
  misc_difference 160: note = uracil or N1-methylpseudouracil
  misc_difference 161: note = uracil or N1-methylpseudouracil
  misc_difference 163: note = uracil or N1-methylpseudouracil
  misc_difference 172: note = uracil or N1-methylpseudouracil
  misc_difference 176: note = uracil or N1-methylpseudouracil
  misc_difference 178: note = uracil or N1-methylpseudouracil
  misc_difference 179: note = uracil or N1-methylpseudouracil
  misc_difference 182: note = uracil or N1-methylpseudouracil
  misc_difference 193: note = uracil or N1-methylpseudouracil
  misc_difference 194: note = uracil or N1-methylpseudouracil
  misc_difference 203: note = uracil or N1-methylpseudouracil
  misc_difference 206: note = uracil or N1-methylpseudouracil
  misc_difference 221: note = uracil or N1-methylpseudouracil
  misc_difference 233: note = uracil or N1-methylpseudouracil
  misc_difference 242: note = uracil or N1-methylpseudouracil
  misc_difference 248: note = uracil or N1-methylpseudouracil
  misc_difference 251: note = uracil or N1-methylpseudouracil
  misc_difference 257: note = uracil or N1-methylpseudouracil
  misc_difference 266: note = uracil or N1-methylpseudouracil
  misc_difference 290: note = uracil or N1-methylpseudouracil
  misc_difference 299: note = uracil or N1-methylpseudouracil
  misc_difference 302: note = uracil or N1-methylpseudouracil
  misc_difference 305: note = uracil or N1-methylpseudouracil
  misc_difference 310: note = uracil or N1-methylpseudouracil
  misc_difference 314: note = uracil or N1-methylpseudouracil
  misc_difference 320: note = uracil or N1-methylpseudouracil
  misc_difference 325: note = uracil or N1-methylpseudouracil
  misc_difference 329: note = uracil or N1-methylpseudouracil
  misc_difference 331: note = uracil or N1-methylpseudouracil
  misc_difference 353: note = uracil or N1-methylpseudouracil
  misc_difference 362: note = uracil or N1-methylpseudouracil
  misc_difference 365: note = uracil or N1-methylpseudouracil
  misc_difference 369: note = uracil or N1-methylpseudouracil
  misc_difference 377: note = uracil or N1-methylpseudouracil
  misc_difference 383: note = uracil or N1-methylpseudouracil
  misc_difference 387: note = uracil or N1-methylpseudouracil
  misc_difference 388: note = uracil or N1-methylpseudouracil
  misc_difference 391: note = uracil or N1-methylpseudouracil
  misc_difference 398: note = uracil or N1-methylpseudouracil
  misc_difference 410: note = uracil or N1-methylpseudouracil
  misc_difference 416: note = uracil or N1-methylpseudouracil
  misc_difference 420: note = uracil or N1-methylpseudouracil
  misc_difference 423: note = uracil or N1-methylpseudouracil
  misc_difference 425: note = uracil or N1-methylpseudouracil
  misc_difference 428: note = uracil or N1-methylpseudouracil
  misc_difference 431: note = uracil or N1-methylpseudouracil
  misc_difference 433: note = uracil or N1-methylpseudouracil
  misc_difference 442: note = uracil or N1-methylpseudouracil
  misc_difference 446: note = uracil or N1-methylpseudouracil
  misc_difference 449: note = uracil or N1-methylpseudouracil
  misc_difference 457: note = uracil or N1-methylpseudouracil
  misc_difference 474: note = uracil or N1-methylpseudouracil
  misc_difference 483: note = uracil or N1-methylpseudouracil
  misc_difference 485: note = uracil or N1-methylpseudouracil
  misc_difference 490: note = uracil or N1-methylpseudouracil
  misc_difference 500: note = uracil or N1-methylpseudouracil
  misc_difference 506: note = uracil or N1-methylpseudouracil
  misc_difference 509: note = uracil or N1-methylpseudouracil
  misc_difference 511: note = uracil or N1-methylpseudouracil
  misc_difference 512: note = uracil or N1-methylpseudouracil
  misc_difference 517: note = uracil or N1-methylpseudouracil
  misc_difference 518: note = uracil or N1-methylpseudouracil
  misc_difference 532: note = uracil or N1-methylpseudouracil
  misc_difference 544: note = uracil or N1-methylpseudouracil
  misc_difference 545: note = uracil or N1-methylpseudouracil
  misc_difference 547: note = uracil or N1-methylpseudouracil
  misc_difference 548: note = uracil or N1-methylpseudouracil
  misc_difference 551: note = uracil or N1-methylpseudouracil
  misc_difference 554: note = uracil or N1-methylpseudouracil
  misc_difference 560: note = uracil or N1-methylpseudouracil
  misc_difference 563: note = uracil or N1-methylpseudouracil
  misc_difference 566: note = uracil or N1-methylpseudouracil
  misc_difference 572: note = uracil or N1-methylpseudouracil
  misc_difference 590: note = uracil or N1-methylpseudouracil
  misc_difference 596: note = uracil or N1-methylpseudouracil
  misc_difference 599: note = uracil or N1-methylpseudouracil
  misc_difference 603: note = uracil or N1-methylpseudouracil
  misc_difference 608: note = uracil or N1-methylpseudouracil
  misc_difference 610: note = uracil or N1-methylpseudouracil
  misc_difference 611: note = uracil or N1-methylpseudouracil
  misc_difference 620: note = uracil or N1-methylpseudouracil
  misc_difference 626: note = uracil or N1-methylpseudouracil
  misc_difference 644: note = uracil or N1-methylpseudouracil
  misc_difference 647: note = uracil or N1-methylpseudouracil
  misc_difference 656: note = uracil or N1-methylpseudouracil
  misc_difference 658: note = uracil or N1-methylpseudouracil
  misc_difference 659: note = uracil or N1-methylpseudouracil
  misc_difference 665: note = uracil or N1-methylpseudouracil
  misc_difference 673: note = uracil or N1-methylpseudouracil
  misc_difference 677: note = uracil or N1-methylpseudouracil
  misc_difference 689: note = uracil or N1-methylpseudouracil
  misc_difference 695: note = uracil or N1-methylpseudouracil
  misc_difference 697: note = uracil or N1-methylpseudouracil
  misc_difference 698: note = uracil or N1-methylpseudouracil
  misc_difference 707: note = uracil or N1-methylpseudouracil
  misc_difference 719: note = uracil or N1-methylpseudouracil
  misc_difference 726: note = uracil or N1-methylpseudouracil
  misc_difference 733: note = uracil or N1-methylpseudouracil
  misc_difference 734: note = uracil or N1-methylpseudouracil
  misc_difference 736: note = uracil or N1-methylpseudouracil
  misc_difference 737: note = uracil or N1-methylpseudouracil
  misc_difference 743: note = uracil or N1-methylpseudouracil
  misc_difference 746: note = uracil or N1-methylpseudouracil
  misc_difference 752: note = uracil or N1-methylpseudouracil
  misc_difference 754: note = uracil or N1-methylpseudouracil
  misc_difference 758: note = uracil or N1-methylpseudouracil
  misc_difference 766: note = uracil or N1-methylpseudouracil
  misc_difference 780: note = uracil or N1-methylpseudouracil
  misc_difference 785: note = uracil or N1-methylpseudouracil
  misc_difference 797: note = uracil or N1-methylpseudouracil
  misc_difference 800: note = uracil or N1-methylpseudouracil
  misc_difference 802: note = uracil or N1-methylpseudouracil
  misc_difference 811: note = uracil or N1-methylpseudouracil
  misc_difference 812: note = uracil or N1-methylpseudouracil
  misc_difference 814: note = uracil or N1-methylpseudouracil
  misc_difference 825: note = uracil or N1-methylpseudouracil
  misc_difference 832: note = uracil or N1-methylpseudouracil
  misc_difference 833: note = uracil or N1-methylpseudouracil
  misc_difference 837: note = uracil or N1-methylpseudouracil
  misc_difference 844: note = uracil or N1-methylpseudouracil
  misc_difference 846: note = uracil or N1-methylpseudouracil
  misc_difference 863: note = uracil or N1-methylpseudouracil
  misc_difference 865: note = uracil or N1-methylpseudouracil
  misc_difference 866: note = uracil or N1-methylpseudouracil
  misc_difference 871: note = uracil or N1-methylpseudouracil
  misc_difference 874: note = uracil or N1-methylpseudouracil
  misc_difference 875: note = uracil or N1-methylpseudouracil
  misc_difference 881: note = uracil or N1-methylpseudouracil
  misc_difference 884: note = uracil or N1-methylpseudouracil
  misc_difference 887: note = uracil or N1-methylpseudouracil
  misc_difference 893: note = uracil or N1-methylpseudouracil
  misc_difference 921: note = uracil or N1-methylpseudouracil
  misc_difference 928: note = uracil or N1-methylpseudouracil
  misc_difference 929: note = uracil or N1-methylpseudouracil
  misc_difference 932: note = uracil or N1-methylpseudouracil
  misc_difference 941: note = uracil or N1-methylpseudouracil
  misc_difference 949: note = uracil or N1-methylpseudouracil
  misc_difference 953: note = uracil or N1-methylpseudouracil
  misc_difference 957: note = uracil or N1-methylpseudouracil
  misc_difference 960: note = uracil or N1-methylpseudouracil
  misc_difference 973: note = uracil or N1-methylpseudouracil
  misc_difference 974: note = uracil or N1-methylpseudouracil
  misc_difference 977: note = uracil or N1-methylpseudouracil
  misc_difference 979: note = uracil or N1-methylpseudouracil
  misc_difference 986: note = uracil or N1-methylpseudouracil
  misc_difference 999: note = uracil or N1-methylpseudouracil
  misc_difference 1004: note = uracil or N1-methylpseudouracil
  misc_difference 1012: note = uracil or N1-methylpseudouracil
  misc_difference 1013: note = uracil or N1-methylpseudouracil
  misc_difference 1016: note = uracil or N1-methylpseudouracil
  misc_difference 1019: note = uracil or N1-methylpseudouracil
  misc_difference 1040: note = uracil or N1-methylpseudouracil
  misc_difference 1051: note = uracil or N1-methylpseudouracil
  misc_difference 1060: note = uracil or N1-methylpseudouracil
  misc_difference 1064: note = uracil or N1-methylpseudouracil
  misc_difference 1065: note = uracil or N1-methylpseudouracil
  misc_difference 1073: note = uracil or N1-methylpseudouracil
  misc_difference 1074: note = uracil or N1-methylpseudouracil
  misc_difference 1076: note = uracil or N1-methylpseudouracil
  misc_difference 1078: note = uracil or N1-methylpseudouracil
  misc_difference 1080: note = uracil or N1-methylpseudouracil
  misc_difference 1082: note = uracil or N1-methylpseudouracil
  misc_difference 1090: note = uracil or N1-methylpseudouracil
  misc_difference 1097: note = uracil or N1-methylpseudouracil
  misc_difference 1103: note = uracil or N1-methylpseudouracil
  misc_difference 1106: note = uracil or N1-methylpseudouracil
  misc_difference 1114: note = uracil or N1-methylpseudouracil
  misc_difference 1118: note = uracil or N1-methylpseudouracil
  misc_difference 1121: note = uracil or N1-methylpseudouracil
  misc_difference 1124: note = uracil or N1-methylpseudouracil
  misc_difference 1128: note = uracil or N1-methylpseudouracil
  misc_difference 1143: note = uracil or N1-methylpseudouracil
  misc_difference 1178: note = uracil or N1-methylpseudouracil
  misc_difference 1208: note = uracil or N1-methylpseudouracil
  misc_difference 1211: note = uracil or N1-methylpseudouracil
  misc_difference 1216: note = uracil or N1-methylpseudouracil
  misc_difference 1217: note = uracil or N1-methylpseudouracil
  misc_difference 1220: note = uracil or N1-methylpseudouracil
  misc_difference 1229: note = uracil or N1-methylpseudouracil
  misc_difference 1249: note = uracil or N1-methylpseudouracil
  misc_difference 1253: note = uracil or N1-methylpseudouracil
  misc_difference 1256: note = uracil or N1-methylpseudouracil
  misc_difference 1275: note = uracil or N1-methylpseudouracil
  misc_difference 1277: note = uracil or N1-methylpseudouracil
  misc_difference 1281: note = uracil or N1-methylpseudouracil
  misc_difference 1287: note = uracil or N1-methylpseudouracil
  misc_difference 1289: note = uracil or N1-methylpseudouracil
  misc_difference 1292: note = uracil or N1-methylpseudouracil
  misc_difference 1298: note = uracil or N1-methylpseudouracil
atgggcagcagcaagagcaagcctaaggaccctagccagagaagaagaggcggaggctccgcccacgccatggagaacagctggaccatcagcaaggagtaccacatcgacgaggaggtgggcttcgccctgcctaaccctcaggagaacctgcctgacttctacaacgactggatgttcatcgccaagcacttgccggacctgatcgagagcggccagctgagagagagagtggagaagctgaacatgctgagcatcgaccacctgaccgaccacaagagccagagactggccagactggtgctgggctgcatcaccatggcctacgtgtggggcaagggccacggcgacgtgagaaaggtgctgcctagaaacatcgccgtgccttactgccagctgagcaagaagctggagctgcctcctatcctggtgtacgccgactgcgtgctggccaactggaagaagaaggaccctaacaagcctctgacctacgagaacatggacgtgctgttcagcttcagagacggcgactgcagcaagggcttcttcctggtgagcctgctggtggagatcgccgccgccagcgccatcaaggtgatccctaccgtgttcaaggccatgcagatgcaggagagagacaccctgctgaaggccctgttggagatagccagctgcctggagaaggcactgcaggtgttccaccagatccacgaccacgtgaaccctaaggccttcttcagcgtgctgagaatctacctgagcggctggaagggcaaccctcagctgagcgacggcctggtctacgagggcttctgggaggaccctaaggagttcgctggcggctctgccggccagagcagcgtgttccagtgcttcgacgtgctgctgggcatccaacaaaccgcaggaggcggccacgctgcacagttcctgcaggacatgagaagatacatgcctcctgcccacagaaacttcctgtgcagcctggagagcaaccctagcgtgagagagttcgtgctgagcaagggcgacgccggcctgagagaggcctacgacgcctgcgttaaggcccttgtgtctctgagaagctaccacctgcagatcgtgaccaagtacatcctgatccctgccagccagcagcctaaggagaacaagaccagcgaggacccaagcaagctggaggccaagggcaccggcggcaccgacctgatgaacttcctgaagaccgtgagaagcaccaccgagaagtccctcctgaaggagggcggcaagcctatccctaaccctctgctgggcctggacagcacc

SEQ ID NO: 3 - RNA, 1308 nt, synthetic construct
  source 1..1308: mol_type = other RNA
  misc_difference 2: note = uracil or N1-methylpseudouracil
  misc_difference 7: note = uracil or N1-methylpseudouracil
  misc_difference 10: note = uracil or N1-methylpseudouracil
  misc_difference 16: note = uracil or N1-methylpseudouracil
  misc_difference 30: note = uracil or N1-methylpseudouracil
  misc_difference 33: note = uracil or N1-methylpseudouracil
  misc_difference 36: note = uracil or N1-methylpseudouracil
  misc_difference 58: note = uracil or N1-methylpseudouracil
  misc_difference 71: note = uracil or N1-methylpseudouracil
  misc_difference 82: note = uracil or N1-methylpseudouracil
  misc_difference 89: note = uracil or N1-methylpseudouracil
  misc_difference 100: note = uracil or N1-methylpseudouracil
  misc_difference 107: note = uracil or N1-methylpseudouracil
  misc_difference 119: note = uracil or N1-methylpseudouracil
  misc_difference 124: note = uracil or N1-methylpseudouracil
  misc_difference 125: note = uracil or N1-methylpseudouracil
  misc_difference 131: note = uracil or N1-methylpseudouracil
  misc_difference 152: note = uracil or N1-methylpseudouracil
  misc_difference 160: note = uracil or N1-methylpseudouracil
  misc_difference 161: note = uracil or N1-methylpseudouracil
  misc_difference 163: note = uracil or N1-methylpseudouracil
  misc_difference 172: note = uracil or N1-methylpseudouracil
  misc_difference 176: note = uracil or N1-methylpseudouracil
  misc_difference 178: note = uracil or N1-methylpseudouracil
  misc_difference 179: note = uracil or N1-methylpseudouracil
  misc_difference 182: note = uracil or N1-methylpseudouracil
  misc_difference 194: note = uracil or N1-methylpseudouracil
  misc_difference 203: note = uracil or N1-methylpseudouracil
  misc_difference 206: note = uracil or N1-methylpseudouracil
  misc_difference 221: note = uracil or N1-methylpseudouracil
  misc_difference 233: note = uracil or N1-methylpseudouracil
  misc_difference 242: note = uracil or N1-methylpseudouracil
  misc_difference 248: note = uracil or N1-methylpseudouracil
  misc_difference 251: note = uracil or N1-methylpseudouracil
  misc_difference 257: note = uracil or N1-methylpseudouracil
  misc_difference 266: note = uracil or N1-methylpseudouracil
  misc_difference 280: note = uracil or N1-methylpseudouracil
  misc_difference 289: note = uracil or N1-methylpseudouracil
  misc_difference 290: note = uracil or N1-methylpseudouracil
  misc_difference 294: note = uracil or N1-methylpseudouracil
  misc_difference 299: note = uracil or N1-methylpseudouracil
  misc_difference 302: note = uracil or N1-methylpseudouracil
  misc_difference 305: note = uracil or N1-methylpseudouracil
  misc_difference 310: note = uracil or N1-methylpseudouracil
  misc_difference 314: note = uracil or N1-methylpseudouracil
  misc_difference 320: note = uracil or N1-methylpseudouracil
  misc_difference 325: note = uracil or N1-methylpseudouracil
  misc_difference 329: note = uracil or N1-methylpseudouracil
  misc_difference 331: note = uracil or N1-methylpseudouracil
  misc_difference 348: note = uracil or N1-methylpseudouracil
  misc_difference 353: note = uracil or N1-methylpseudouracil
  misc_difference 362: note = uracil or N1-methylpseudouracil
  misc_difference 365: note = uracil or N1-methylpseudouracil
  misc_difference 377: note = uracil or N1-methylpseudouracil
  misc_difference 383: note = uracil or N1-methylpseudouracil
  misc_difference 388: note = uracil or N1-methylpseudouracil
  misc_difference 391: note = uracil or N1-methylpseudouracil
  misc_difference 398: note = uracil or N1-methylpseudouracil
  misc_difference 410: note = uracil or N1-methylpseudouracil
  misc_difference 416: note = uracil or N1-methylpseudouracil
  misc_difference 420: note = uracil or N1-methylpseudouracil
  misc_difference 425: note = uracil or N1-methylpseudouracil
  misc_difference 428: note = uracil or N1-methylpseudouracil
  misc_difference 431: note = uracil or N1-methylpseudouracil
  misc_difference 433: note = uracil or N1-methylpseudouracil
  misc_difference 442: note = uracil or N1-methylpseudouracil
  misc_difference 446: note = uracil or N1-methylpseudouracil
  misc_difference 449: note = uracil or N1-methylpseudouracil
  misc_difference 457: note = uracil or N1-methylpseudouracil
  misc_difference 485: note = uracil or N1-methylpseudouracil
  misc_difference 490: note = uracil or N1-methylpseudouracil
  misc_difference 500: note = uracil or N1-methylpseudouracil
  misc_difference 506: note = uracil or N1-methylpseudouracil
  misc_difference 509: note = uracil or N1-methylpseudouracil
  misc_difference 511: note = uracil or N1-methylpseudouracil
  misc_difference 512: note = uracil or N1-methylpseudouracil
  misc_difference 514: note = uracil or N1-methylpseudouracil
  misc_difference 517: note = uracil or N1-methylpseudouracil
  misc_difference 518: note = uracil or N1-methylpseudouracil
  misc_difference 532: note = uracil or N1-methylpseudouracil
  misc_difference 544: note = uracil or N1-methylpseudouracil
  misc_difference 545: note = uracil or N1-methylpseudouracil
  misc_difference 547: note = uracil or N1-methylpseudouracil
  misc_difference 548: note = uracil or N1-methylpseudouracil
  misc_difference 551: note = uracil or N1-methylpseudouracil
  misc_difference 554: note = uracil or N1-methylpseudouracil
  misc_difference 560: note = uracil or N1-methylpseudouracil
  misc_difference 563: note = uracil or N1-methylpseudouracil
  misc_difference 566: note = uracil or N1-methylpseudouracil
  misc_difference 572: note = uracil or N1-methylpseudouracil
  misc_difference 583: note = uracil or N1-methylpseudouracil
  misc_difference 585: note = uracil or N1-methylpseudouracil
  misc_difference 590: note = uracil or N1-methylpseudouracil
  misc_difference 596: note = uracil or N1-methylpseudouracil
  misc_difference 599: note = uracil or N1-methylpseudouracil
  misc_difference 608: note = uracil or N1-methylpseudouracil
  misc_difference 610: note = uracil or N1-methylpseudouracil
  misc_difference 611: note = uracil or N1-methylpseudouracil
  misc_difference 620: note = uracil or N1-methylpseudouracil
  misc_difference 626: note = uracil or N1-methylpseudouracil
  misc_difference 644: note = uracil or N1-methylpseudouracil
  misc_difference 647: note = uracil or N1-methylpseudouracil
  misc_difference 656: note = uracil or N1-methylpseudouracil
  misc_difference 659: note = uracil or N1-methylpseudouracil
  misc_difference 665: note = uracil or N1-methylpseudouracil
  misc_difference 673: note = uracil or N1-methylpseudouracil
  misc_difference 677: note = uracil or N1-methylpseudouracil
  misc_difference 689: note = uracil or N1-methylpseudouracil
  misc_difference 695: note = uracil or N1-methylpseudouracil
  misc_difference 697: note = uracil or N1-methylpseudouracil
  misc_difference 698: note = uracil or N1-methylpseudouracil
  misc_difference 707: note = uracil or N1-methylpseudouracil
  misc_difference 719: note = uracil or N1-methylpseudouracil
  misc_difference 733: note = uracil or N1-methylpseudouracil
  misc_difference 734: note = uracil or N1-methylpseudouracil
  misc_difference 736: note = uracil or N1-methylpseudouracil
  misc_difference 737: note = uracil or N1-methylpseudouracil
  misc_difference 743: note = uracil or N1-methylpseudouracil
  misc_difference 746: note = uracil or N1-methylpseudouracil
  misc_difference 752: note = uracil or N1-methylpseudouracil
  misc_difference 754: note = uracil or N1-methylpseudouracil
  misc_difference 758: note = uracil or N1-methylpseudouracil
  misc_difference 760: note = uracil or N1-methylpseudouracil
  misc_difference 766: note = uracil or N1-methylpseudouracil
  misc_difference 777: note = uracil or N1-methylpseudouracil
  misc_difference 785: note = uracil or N1-methylpseudouracil
  misc_difference 797: note = uracil or N1-methylpseudouracil
  misc_difference 800: note = uracil or N1-methylpseudouracil
  misc_difference 802: note = uracil or N1-methylpseudouracil
  misc_difference 811: note = uracil or N1-methylpseudouracil
  misc_difference 812: note = uracil or N1-methylpseudouracil
  misc_difference 814: note = uracil or N1-methylpseudouracil
  misc_difference 832: note = uracil or N1-methylpseudouracil
  misc_difference 833: note = uracil or N1-methylpseudouracil
  misc_difference 834: note = uracil or N1-methylpseudouracil
  misc_difference 837: note = uracil or N1-methylpseudouracil
  misc_difference 843: note = uracil or N1-methylpseudouracil
  misc_difference 849: note = uracil or N1-methylpseudouracil
  misc_difference 856: note = uracil or N1-methylpseudouracil
  misc_difference 863: note = uracil or N1-methylpseudouracil
  misc_difference 865: note = uracil or N1-methylpseudouracil
  misc_difference 866: note = uracil or N1-methylpseudouracil
  misc_difference 871: note = uracil or N1-methylpseudouracil
  misc_difference 874: note = uracil or N1-methylpseudouracil
  misc_difference 875: note = uracil or N1-methylpseudouracil
  misc_difference 881: note = uracil or N1-methylpseudouracil
  misc_difference 884: note = uracil or N1-methylpseudouracil
  misc_difference 887: note = uracil or N1-methylpseudouracil
  misc_difference 893: note = uracil or N1-methylpseudouracil
  misc_difference 894: note = uracil or N1-methylpseudouracil
  misc_difference 906: note = uracil or N1-methylpseudouracil
  misc_difference 921: note = uracil or N1-methylpseudouracil
  misc_difference 928: note = uracil or N1-methylpseudouracil
  misc_difference 929: note = uracil or N1-methylpseudouracil
  misc_difference 932: note = uracil or N1-methylpseudouracil
  misc_difference 941: note = uracil or N1-methylpseudouracil
  misc_difference 949: note = uracil or N1-methylpseudouracil
  misc_difference 953: note = uracil or N1-methylpseudouracil
  misc_difference 973: note = uracil or N1-methylpseudouracil
  misc_difference 974: note = uracil or N1-methylpseudouracil
  misc_difference 977: note = uracil or N1-methylpseudouracil
  misc_difference 979: note = uracil or N1-methylpseudouracil
  misc_difference 982: note = uracil or N1-methylpseudouracil
  misc_difference 986: note = uracil or N1-methylpseudouracil
  misc_difference 1000: note = uracil or N1-methylpseudouracil
  misc_difference 1004: note = uracil or N1-methylpseudouracil
  misc_difference 1012: note = uracil or N1-methylpseudouracil
  misc_difference 1013: note = uracil or N1-methylpseudouracil
  misc_difference 1016: note = uracil or N1-methylpseudouracil
  misc_difference 1019: note = uracil or N1-methylpseudouracil
  misc_difference 1021: note = uracil or N1-methylpseudouracil
  misc_difference 1040: note = uracil or N1-methylpseudouracil
  misc_difference 1051: note = uracil or N1-methylpseudouracil
  misc_difference 1060: note = uracil or N1-methylpseudouracil
  misc_difference 1064: note = uracil or N1-methylpseudouracil
  misc_difference 1073: note = uracil or N1-methylpseudouracil
  misc_difference 1076: note = uracil or N1-methylpseudouracil
  misc_difference 1078: note = uracil or N1-methylpseudouracil
  misc_difference 1082: note = uracil or N1-methylpseudouracil
  misc_difference 1090: note = uracil or N1-methylpseudouracil
  misc_difference 1097: note = uracil or N1-methylpseudouracil
  misc_difference 1103: note = uracil or N1-methylpseudouracil
  misc_difference 1106: note = uracil or N1-methylpseudouracil
  misc_difference 1114: note = uracil or N1-methylpseudouracil
  misc_difference 1118: note = uracil or N1-methylpseudouracil
  misc_difference 1121: note = uracil or N1-methylpseudouracil
  misc_difference 1124: note = uracil or N1-methylpseudouracil
  misc_difference 1171: note = uracil or N1-methylpseudouracil
  misc_difference 1178: note = uracil or N1-methylpseudouracil
  misc_difference 1185: note = uracil or N1-methylpseudouracil
  misc_difference 1203: note = uracil or N1-methylpseudouracil
  misc_difference 1208: note = uracil or N1-methylpseudouracil
  misc_difference 1211: note = uracil or N1-methylpseudouracil
  misc_difference 1216: note = uracil or N1-methylpseudouracil
  misc_difference 1217: note = uracil or N1-methylpseudouracil
  misc_difference 1220: note = uracil or N1-methylpseudouracil
  misc_difference 1229: note = uracil or N1-methylpseudouracil
  misc_difference 1253: note = uracil or N1-methylpseudouracil
  misc_difference 1256: note = uracil or N1-methylpseudouracil
  misc_difference 1277: note = uracil or N1-methylpseudouracil
  misc_difference 1284: note = uracil or N1-methylpseudouracil
  misc_difference 1289: note = uracil or N1-methylpseudouracil
  misc_difference 1292: note = uracil or N1-methylpseudouracil
  misc_difference 1298: note = uracil or N1-methylpseudouracil
  misc_difference 1303: note = uracil or N1-methylpseudouracil
atggggtcgtcgaagtcgaagccgaaagatcctagtcagcgcaggaggggaggaggatccgcccacgccatggagaacagctggaccatcagcaaggagtaccacatcgacgaggaggtgggcttcgccctgcccaacccacaggagaacctgcccgacttctacaacgactggatgttcatcgccaagcacctgcccgacctgatcgagagcgggcagctgcgggaacgggtggagaagctgaacatgctgagcatcgaccacctgaccgaccacaagtcccagcggttggctcggctggtgctgggctgcatcaccatggcctacgtgtggggaaaggggcacggtgacgtgcggaaggtgctgccccgcaacatcgccgtgccctactgccagctgagcaagaagctggagctgcctccgatcctggtgtacgccgactgcgtgctggccaactggaagaagaaggaccccaacaagcccctgacctacgagaacatggacgtgctgttctccttccgggacggggactgcagcaaggggttcttcctggtgagcctgctggtggagatcgccgccgcctctgccatcaaggtgatccccaccgtgttcaaggccatgcagatgcaggagagggacaccctgctgaaggccctgctggagatcgccagctgcctggagaaggccctgcaggtgttccaccagatccacgaccacgtgaaccccaaggccttcttcagcgtgctgcgcatctacctgtccggctggaagggcaatccccagctgagcgacggcctggtgtacgagggcttctgggaggaccccaaggaatttgctggcggtagcgctggccagtccagcgtgttccagtgcttcgacgtgctgctgggcattcagcaaaccgctggaggcggacacgctgcccagttcctgcaggacatgcggcggtacatgccaccggcccaccgcaacttcctgtgctccctggagagcaacccctccgtgcgggagttcgtgctgtccaagggcgacgccggactgagggaggcctacgacgcctgcgtgaaggccctggtgtccctgcgcagctaccacctgcagatcgtgaccaagtacatcctgatccccgcaagccagcagcccaaggagaacaagaccagcgaggacccctccaagctggaagctaagggcaccggcggcactgacctgatgaacttcctgaagaccgtgcggagcaccaccgagaagagcctgctgaaggagggcgggaagccgatcccgaatcccctcctcgggctcgactcgacg

SEQ ID NO: 4 - protein, 422 aa, synthetic construct
MGSSKSKPKDPSQRRRGGGSAHAMENSWTISKEYHIDEEVGFALPNPQENLPDFYNDWMFIAKHLPDLIESGQLRERVEKLNMLSIDHLTDHKSQRLARLVLGCITMAYVWGKGHGDVRKVLPRNIAVPYCQLSKKLELPPILVYADCVLANWKKKDPNKPLTYENMDVLFSFRDGDCSKGFFLVSLLVEIAAASAIKVIPTVFKAMQMQERDTLLKALLEIASCLEKALQVFHQIHDHVNPKAFFSVLRIYLSGWKGNPQLSDGLVYEGFWEDPKEFAGGSAGQSSVFQCFDVLLGIQQTAGGGHAAQFLQDMRRYMPPAHRNFLCSLESNPSVREFVLSKGDAGLREAYDACVKALVSLRSYHLQIVTKYILIPASQQPKENKTSEDPSKLEAKGTGGTDLMNFLKTVRSTTEKSLLKEG

SEQ ID NO: 5 - RNA, 1266 nt, synthetic construct
  source 1..1266: mol_type = other RNA
  misc_difference 2: note = uracil or N1-methylpseudouracil
  misc_difference 7: note = uracil or N1-methylpseudouracil
  misc_difference 10: note = uracil or N1-methylpseudouracil
  misc_difference 16: note = uracil or N1-methylpseudouracil
  misc_difference 30: note = uracil or N1-methylpseudouracil
  misc_difference 33: note = uracil or N1-methylpseudouracil
  misc_difference 36: note = uracil or N1-methylpseudouracil
  misc_difference 58: note = uracil or N1-methylpseudouracil
  misc_difference 71: note = uracil or N1-methylpseudouracil
  misc_difference 82: note = uracil or N1-methylpseudouracil
  misc_difference 89: note = uracil or N1-methylpseudouracil
  misc_difference 100: note = uracil or N1-methylpseudouracil
  misc_difference 107: note = uracil or N1-methylpseudouracil
  misc_difference 119: note = uracil or N1-methylpseudouracil
  misc_difference 124: note = uracil or N1-methylpseudouracil
  misc_difference 125: note = uracil or N1-methylpseudouracil
  misc_difference 131: note = uracil or N1-methylpseudouracil
  misc_difference 152: note = uracil or N1-methylpseudouracil
  misc_difference 160: note = uracil or N1-methylpseudouracil
  misc_difference 161: note = uracil or N1-methylpseudouracil
  misc_difference 163: note = uracil or N1-methylpseudouracil
  misc_difference 172: note = uracil or N1-methylpseudouracil
  misc_difference 176: note = uracil or N1-methylpseudouracil
  misc_difference 178: note = uracil or N1-methylpseudouracil
  misc_difference 179: note = uracil or N1-methylpseudouracil
  misc_difference 182: note = uracil or N1-methylpseudouracil
  misc_difference 194: note = uracil or N1-methylpseudouracil
  misc_difference 203: note = uracil or N1-methylpseudouracil
  misc_difference 206: note = uracil or N1-methylpseudouracil
  misc_difference 221: note = uracil or N1-methylpseudouracil
  misc_difference 233: note = uracil or N1-methylpseudouracil
  misc_difference 242: note = uracil or N1-methylpseudouracil
  misc_difference 248: note = uracil or N1-methylpseudouracil
  misc_difference 251: note = uracil or N1-methylpseudouracil
  misc_difference 257: note = uracil or N1-methylpseudouracil
  misc_difference 266: note = uracil or N1-methylpseudouracil
  misc_difference 280: note = uracil or N1-methylpseudouracil
  misc_difference 289: note = uracil or N1-methylpseudouracil
  misc_difference 290: note = uracil or N1-methylpseudouracil
  misc_difference 294: note = uracil or N1-methylpseudouracil
  misc_difference 299: note = uracil or N1-methylpseudouracil
  misc_difference 302: note = uracil or N1-methylpseudouracil
  misc_difference 305: note = uracil or N1-methylpseudouracil
  misc_difference 310: note = uracil or N1-methylpseudouracil
  misc_difference 314: note = uracil or N1-methylpseudouracil
  misc_difference 320: note = uracil or N1-methylpseudouracil
  misc_difference 325: note = uracil or N1-methylpseudouracil
  misc_difference 329: note = uracil or N1-methylpseudouracil
  misc_difference 331: note = uracil or N1-methylpseudouracil
  misc_difference 348: note = uracil or N1-methylpseudouracil
  misc_difference 353: note = uracil or N1-methylpseudouracil
  misc_difference 362: note = uracil or N1-methylpseudouracil
  misc_difference 365: note = uracil or N1-methylpseudouracil
  misc_difference 377: note = uracil or N1-methylpseudouracil
  misc_difference 383: note = uracil or N1-methylpseudouracil
  misc_difference 388: note = uracil or N1-methylpseudouracil
  misc_difference 391: note = uracil or N1-methylpseudouracil
  misc_difference 398: note = uracil or N1-methylpseudouracil
  misc_difference 410: note = uracil or N1-methylpseudouracil
  misc_difference 416: note = uracil or N1-methylpseudouracil
  misc_difference 420: note = uracil or N1-methylpseudouracil
  misc_difference 425: note = uracil or N1-methylpseudouracil
  misc_difference 428: note = uracil or N1-methylpseudouracil
  misc_difference 431: note = uracil or N1-methylpseudouracil
  misc_difference 433: note = uracil or N1-methylpseudouracil
  misc_difference 442: note = uracil or N1-methylpseudouracil
  misc_difference 446: note = uracil or N1-methylpseudouracil
  misc_difference 449: note = uracil or N1-methylpseudouracil
  misc_difference 457: note = uracil or N1-methylpseudouracil
  misc_difference 485: note = uracil or N1-methylpseudouracil
  misc_difference 490: note = uracil or N1-methylpseudouracil
  misc_difference 500: note = uracil or N1-methylpseudouracil
  misc_difference 506: note = uracil or N1-methylpseudouracil
  misc_difference 509: note = uracil or N1-methylpseudouracil
  misc_difference 511: note = uracil or N1-methylpseudouracil
  misc_difference 512: note = uracil or N1-methylpseudouracil
  misc_difference 514: note = uracil or N1-methylpseudouracil
  misc_difference 517: note = uracil or N1-methylpseudouracil
  misc_difference 518: note = uracil or N1-methylpseudouracil
  misc_difference 532: note = uracil or N1-methylpseudouracil
  misc_difference 544: note = uracil or N1-methylpseudouracil
  misc_difference 545: note = uracil or N1-methylpseudouracil
  misc_difference 547: note = uracil or N1-methylpseudouracil
  misc_difference 548: note = uracil or N1-methylpseudouracil
  misc_difference 551: note = uracil or N1-methylpseudouracil
  misc_difference 554: note = uracil or N1-methylpseudouracil
  misc_difference 560: note = uracil or N1-methylpseudouracil
  misc_difference 563: note = uracil or N1-methylpseudouracil
  misc_difference 566: note = uracil or N1-methylpseudouracil
  misc_difference 572: note = uracil or N1-methylpseudouracil
  misc_difference 583: note = uracil or N1-methylpseudouracil
  misc_difference 585: note = uracil or N1-methylpseudouracil
  misc_difference 590: note = uracil or N1-methylpseudouracil
  misc_difference 596: note = uracil or N1-methylpseudouracil
  misc_difference 599: note = uracil or N1-methylpseudouracil
  misc_difference 608: note = uracil or N1-methylpseudouracil
  misc_difference 610: note = uracil or N1-methylpseudouracil
  misc_difference 611: note = uracil or N1-methylpseudouracil
  misc_difference 620: note = uracil or N1-methylpseudouracil
  misc_difference 626: note = uracil or N1-methylpseudouracil
  misc_difference 644: note = uracil or N1-methylpseudouracil
  misc_difference 647: note = uracil or N1-methylpseudouracil
  misc_difference 656: note = uracil or N1-methylpseudouracil
  misc_difference 659: note = uracil or N1-methylpseudouracil
  misc_difference 665: note = uracil or N1-methylpseudouracil
  misc_difference 673: note = uracil or N1-methylpseudouracil
  misc_difference 677: note = uracil or N1-methylpseudouracil
  misc_difference 689: note = uracil or N1-methylpseudouracil
  misc_difference 695: note = uracil or N1-methylpseudouracil
  misc_difference 697: note = uracil or N1-methylpseudouracil
  misc_difference 698: note = uracil or N1-methylpseudouracil
  misc_difference 707: note = uracil or N1-methylpseudouracil
  misc_difference 719: note = uracil or N1-methylpseudouracil
  misc_difference 733: note = uracil or N1-methylpseudouracil
  misc_difference 734: note = uracil or N1-methylpseudouracil
  misc_difference 736: note = uracil or N1-methylpseudouracil
  misc_difference 737: note = uracil or N1-methylpseudouracil
  misc_difference 743: note = uracil or N1-methylpseudouracil
  misc_difference 746: note = uracil or N1-methylpseudouracil
  misc_difference 752: note = uracil or N1-methylpseudouracil
  misc_difference 754: note = uracil or N1-methylpseudouracil
  misc_difference 758: note = uracil or N1-methylpseudouracil
  misc_difference 760: note = uracil or N1-methylpseudouracil
  misc_difference 766: note = uracil or N1-methylpseudouracil
  misc_difference 777: note = uracil or N1-methylpseudouracil
  misc_difference 785: note = uracil or N1-methylpseudouracil
  misc_difference 797: note = uracil or N1-methylpseudouracil
  misc_difference 800: note = uracil or N1-methylpseudouracil
  misc_difference 802: note = uracil or N1-methylpseudouracil
  misc_difference 811: note = uracil or N1-methylpseudouracil
  misc_difference 812: note = uracil or N1-methylpseudouracil
  misc_difference 814: note = uracil or N1-methylpseudouracil
  misc_difference 832: note = uracil or N1-methylpseudouracil
  misc_difference 833: note = uracil or N1-methylpseudouracil
  misc_difference 834: note = uracil or N1-methylpseudouracil
  misc_difference 837: note = uracil or N1-methylpseudouracil
  misc_difference 843: note = uracil or N1-methylpseudouracil
  misc_difference 849: note = uracil or N1-methylpseudouracil
  misc_difference 856: note = uracil or N1-methylpseudouracil
  misc_difference 863: note = uracil or N1-methylpseudouracil
  misc_difference 865: note = uracil or N1-methylpseudouracil
  misc_difference 866: note = uracil or N1-methylpseudouracil
  misc_difference 871: note = uracil or N1-methylpseudouracil
  misc_difference 874: note = uracil or N1-methylpseudouracil
  misc_difference 875: note = uracil or N1-methylpseudouracil
  misc_difference 881: note = uracil or N1-methylpseudouracil
  misc_difference 884: note = uracil or N1-methylpseudouracil
  misc_difference 887: note = uracil or N1-methylpseudouracil
  misc_difference 893: note = uracil or N1-methylpseudouracil
  misc_difference 894: note = uracil or N1-methylpseudouracil
  misc_difference 906: note = uracil or N1-methylpseudouracil
  misc_difference 921: note = uracil or N1-methylpseudouracil
  misc_difference 928: note = uracil or N1-methylpseudouracil
  misc_difference 929: note = uracil or N1-methylpseudouracil
  misc_difference 932: note = uracil or N1-methylpseudouracil
  misc_difference 941: note = uracil or N1-methylpseudouracil
  misc_difference 949: note = uracil or N1-methylpseudouracil
  misc_difference 953: note = uracil or N1-methylpseudouracil
  misc_difference 973: note = uracil or N1-methylpseudouracil
  misc_difference 974: note = uracil or N1-methylpseudouracil
  misc_difference 977: note = uracil or N1-methylpseudouracil
  misc_difference 979: note = uracil or N1-methylpseudouracil
  misc_difference 982: note = uracil or N1-methylpseudouracil
  misc_difference 986: note = uracil or N1-methylpseudouracil
  misc_difference 1000: note = uracil or N1-methylpseudouracil
  misc_difference 1004: note = uracil or N1-methylpseudouracil
  misc_difference 1012: note = uracil or N1-methylpseudouracil
  misc_difference 1013: note = uracil or N1-methylpseudouracil
  misc_difference 1016: note = uracil or N1-methylpseudouracil
  misc_difference 1019: note = uracil or N1-methylpseudouracil
  misc_difference 1021: note = uracil or N1-methylpseudouracil
  misc_difference 1040: note = uracil or N1-methylpseudouracil
  misc_difference 1051: note = uracil or N1-methylpseudouracil
  misc_difference 1060: note = uracil or N1-methylpseudouracil
  misc_difference 1064: note = uracil or N1-methylpseudouracil
  misc_difference 1073: note = uracil or N1-methylpseudouracil
  misc_difference 1076: note = uracil or N1-methylpseudouracil
  misc_difference 1078: note = uracil or N1-methylpseudouracil
  misc_difference 1082: note = uracil or N1-methylpseudouracil
  misc_difference 1090: note = uracil or N1-methylpseudouracil
  misc_difference 1097: note = uracil or N1-methylpseudouracil
  misc_difference 1103: note = uracil or N1-methylpseudouracil
  misc_difference 1106: note = uracil or N1-methylpseudouracil
  misc_difference 1114: note = uracil or N1-methylpseudouracil
  misc_difference 1118: note = uracil or N1-methylpseudouracil
  misc_difference 1121: note = uracil or N1-methylpseudouracil
  misc_difference 1124: note = uracil or N1-methylpseudouracil
  misc_difference 1171: note = uracil or N1-methylpseudouracil
  misc_difference 1178: note = uracil or N1-methylpseudouracil
  misc_difference 1185: note = uracil or N1-methylpseudouracil
  misc_difference 1203: note = uracil or N1-methylpseudouracil
  misc_difference 1208: note = uracil or N1-methylpseudouracil
  misc_difference 1211: note = uracil or N1-methylpseudouracil
  misc_difference 1216: note = uracil or N1-methylpseudouracil
  misc_difference 1217: note = uracil or N1-methylpseudouracil
  misc_difference 1220: note = uracil or N1-methylpseudouracil
  misc_difference 1229: note = uracil or N1-methylpseudouracil
  misc_difference 1253: note = uracil or N1-methylpseudouracil
  misc_difference 1256: note = uracil or N1-methylpseudouracil
atggggtcgtcgaagtcgaagccgaaagatcctagtcagcgcaggaggggaggaggatccgcccacgccatggagaacagctggaccatcagcaaggagtaccacatcgacgaggaggtgggcttcgccctgcccaacccacaggagaacctgcccgacttctacaacgactggatgttcatcgccaagcacctgcccgacctgatcgagagcgggcagctgcgggaacgggtggagaagctgaacatgctgagcatcgaccacctgaccgaccacaagtcccagcggttggctcggctggtgctgggctgcatcaccatggcctacgtgtggggaaaggggcacggtgacgtgcggaaggtgctgccccgcaacatcgccgtgccctactgccagctgagcaagaagctggagctgcctccgatcctggtgtacgccgactgcgtgctggccaactggaagaagaaggaccccaacaagcccctgacctacgagaacatggacgtgctgttctccttccgggacggggactgcagcaaggggttcttcctggtgagcctgctggtggagatcgccgccgcctctgccatcaaggtgatccccaccgtgttcaaggccatgcagatgcaggagagggacaccctgctgaaggccctgctggagatcgccagctgcctggagaaggccctgcaggtgttccaccagatccacgaccacgtgaaccccaaggccttcttcagcgtgctgcgcatctacctgtccggctggaagggcaatccccagctgagcgacggcctggtgtacgagggcttctgggaggaccccaaggaatttgctggcggtagcgctggccagtccagcgtgttccagtgcttcgacgtgctgctgggcattcagcaaaccgctggaggcggacacgctgcccagttcctgcaggacatgcggcggtacatgccaccggcccaccgcaacttcctgtgctccctggagagcaacccctccgtgcgggagttcgtgctgtccaagggcgacgccggactgagggaggcctacgacgcctgcgtgaaggccctggtgtccctgcgcagctaccacctgcagatcgtgaccaagtacatcctgatccccgcaagccagcagcccaaggagaacaagaccagcgaggacccctccaagctggaagctaagggcaccggcggcactgacctgatgaacttcctgaagaccgtgcggagcaccaccgagaagagcctgctgaaggagggc

SEQ ID NO: 6 - protein, 403 aa, synthetic construct [sequence omitted]

SEQ ID NO: 7 - RNA, 1209 nt, synthetic construct
  source 1..1209: mol_type = other RNA
  misc_difference 2: note = uracil or N1-methylpseudouracil
  misc_difference 12: note = uracil or N1-methylpseudouracil
  misc_difference 14: note = uracil or N1-methylpseudouracil
  misc_difference 22: note = uracil or N1-methylpseudouracil
  misc_difference 25: note = uracil or N1-methylpseudouracil
  misc_difference 32: note = uracil or N1-methylpseudouracil
  misc_difference 36: note = uracil or N1-methylpseudouracil
  misc_difference 43: note = uracil or N1-methylpseudouracil
  misc_difference 48: note = uracil or N1-methylpseudouracil
  misc_difference 50: note = uracil or N1-methylpseudouracil
  misc_difference 51: note = uracil or N1-methylpseudouracil
  misc_difference 62: note = uracil or N1-methylpseudouracil
  misc_difference 67: note = uracil or N1-methylpseudouracil
  misc_difference 68: note = uracil or N1-methylpseudouracil
  misc_difference 69: note = uracil or N1-methylpseudouracil
  misc_difference 72: note = uracil or N1-methylpseudouracil
  misc_difference 73: note = uracil or N1-methylpseudouracil
  misc_difference 74: note = uracil or N1-methylpseudouracil
  misc_difference 81: note = uracil or N1-methylpseudouracil
  misc_difference 93: note = uracil or N1-methylpseudouracil
  misc_difference 95: note = uracil or N1-methylpseudouracil
  misc_difference 102: note = uracil or N1-methylpseudouracil
  misc_difference 103: note = uracil or N1-methylpseudouracil
  misc_difference 104: note = uracil or N1-methylpseudouracil
  misc_difference 106: note = uracil or N1-methylpseudouracil
  misc_difference 108: note = uracil or N1-methylpseudouracil
  misc_difference 115: note = uracil or N1-methylpseudouracil
  misc_difference 119: note = uracil or N1-methylpseudouracil
  misc_difference 121: note = uracil or N1-methylpseudouracil
  misc_difference 122: note = uracil or N1-methylpseudouracil
  misc_difference 125: note = uracil or N1-methylpseudouracil
  misc_difference 126: note = uracil or N1-methylpseudouracil
  misc_difference 129: note = uracil or N1-methylpseudouracil
  misc_difference 135: note = uracil or N1-methylpseudouracil
  misc_difference 136: note = uracil or N1-methylpseudouracil
  misc_difference 137: note = uracil or N1-methylpseudouracil
  misc_difference 144: note = uracil or N1-methylpseudouracil
  misc_difference 146: note = uracil or N1-methylpseudouracil
  misc_difference 149: note = uracil or N1-methylpseudouracil
  misc_difference 154: note = uracil or N1-methylpseudouracil
  misc_difference 156: note = uracil or N1-methylpseudouracil
  misc_difference 164: note = uracil or N1-methylpseudouracil
  misc_difference 165: note = uracil or N1-methylpseudouracil
  misc_difference 176: note = uracil or N1-methylpseudouracil
  misc_difference 177: note = uracil or N1-methylpseudouracil
  misc_difference 184: note = uracil or N1-methylpseudouracil
  misc_difference 185: note = uracil or N1-methylpseudouracil
  misc_difference 191: note = uracil or N1-methylpseudouracil
  misc_difference 194: note = uracil or N1-methylpseudouracil
  misc_difference 200: note = uracil or N1-methylpseudouracil
  misc_difference 201: note = uracil or N1-methylpseudouracil
  misc_difference 204: note = uracil or N1-methylpseudouracil
  misc_difference 207: note = uracil or N1-methylpseudouracil
  misc_difference 209: note = uracil or N1-methylpseudouracil
  misc_difference 223: note = uracil or N1-methylpseudouracil
  misc_difference 233: note = uracil or N1-methylpseudouracil
  misc_difference 234: note = uracil or N1-methylpseudouracil
  misc_difference 240: note = uracil or N1-methylpseudouracil
  misc_difference 242: note = uracil or N1-methylpseudouracil
  misc_difference 245: note = uracil or N1-methylpseudouracil
  misc_difference 246: note = uracil or N1-methylpseudouracil
  misc_difference 248: note = uracil or N1-methylpseudouracil
  misc_difference 253: note = uracil or N1-methylpseudouracil
  misc_difference 257: note = uracil or N1-methylpseudouracil
  misc_difference 263: note = uracil or N1-methylpseudouracil
  misc_difference 268: note = uracil or N1-methylpseudouracil
  misc_difference 270: note = uracil or N1-methylpseudouracil
  misc_difference 272: note = uracil or N1-methylpseudouracil
  misc_difference 274: note = uracil or N1-methylpseudouracil
  misc_difference 285: note = uracil or N1-methylpseudouracil
  misc_difference 288: note = uracil or N1-methylpseudouracil
  misc_difference 294: note = uracil or N1-methylpseudouracil
  misc_difference 296: note = uracil or N1-methylpseudouracil
  misc_difference 300: note = uracil or N1-methylpseudouracil
  misc_difference 305: note = uracil or N1-methylpseudouracil
  misc_difference 307: note = uracil or N1-methylpseudouracil
  misc_difference 308: note = uracil or N1-methylpseudouracil
  misc_difference 318: note = uracil or N1-methylpseudouracil
  misc_difference 320: note = uracil or N1-methylpseudouracil
  misc_difference 321: note = uracil or N1-methylpseudouracil
  misc_difference 324: note = uracil or N1-methylpseudouracil
  misc_difference 326: note = uracil or N1-methylpseudouracil
  misc_difference 327: note = uracil or N1-methylpseudouracil
  misc_difference 330: note = uracil or N1-methylpseudouracil
  misc_difference 331: note = uracil or N1-methylpseudouracil
  misc_difference 334: note = uracil or N1-methylpseudouracil
  misc_difference 341: note = uracil or N1-methylpseudouracil
  misc_difference 343: note = uracil or N1-methylpseudouracil
  misc_difference 353: note = uracil or N1-methylpseudouracil
  misc_difference 359: note = uracil or N1-methylpseudouracil
  misc_difference 363: note = uracil or N1-methylpseudouracil
  misc_difference 366: note = uracil or N1-methylpseudouracil
  misc_difference 368: note = uracil or N1-methylpseudouracil
  misc_difference 369: note = uracil or N1-methylpseudouracil
  misc_difference 370: note = uracil or N1-methylpseudouracil
  misc_difference 371: note = uracil or N1-methylpseudouracil
  misc_difference 374: note = uracil or N1-methylpseudouracil
  misc_difference 375: note = uracil or N1-methylpseudouracil
  misc_difference 376: note = uracil or N1-methylpseudouracil
  misc_difference 378: note = uracil or N1-methylpseudouracil
  misc_difference 385: note = uracil or N1-methylpseudouracil
  misc_difference 387: note = uracil or N1-methylpseudouracil
  misc_difference 389: note = uracil or N1-methylpseudouracil
  misc_difference 391: note = uracil or N1-methylpseudouracil
  misc_difference 392: note = uracil or N1-methylpseudouracil
  misc_difference 399: note = uracil or N1-methylpseudouracil
  misc_difference 400: note = uracil or N1-methylpseudouracil
  misc_difference 414: note = uracil or N1-methylpseudouracil
  misc_difference 417: note = uracil or N1-methylpseudouracil
  misc_difference 420: note = uracil or N1-methylpseudouracil
  misc_difference 428: note = uracil or N1-methylpseudouracil
  misc_difference 432: note = uracil or N1-methylpseudouracil
  misc_difference 433: note = uracil or N1-methylpseudouracil
  misc_difference 435: note = uracil or N1-methylpseudouracil
  misc_difference 443: note = uracil or N1-methylpseudouracil
  misc_difference 449: note = uracil or N1-methylpseudouracil
  misc_difference 450: note = uracil or N1-methylpseudouracil
  misc_difference 451: note = uracil or N1-methylpseudouracil
  misc_difference 452: note = uracil or N1-methylpseudouracil
  misc_difference 454: note = uracil or N1-methylpseudouracil
  misc_difference 455: note = uracil or N1-methylpseudouracil
  misc_difference 457: note = uracil or N1-methylpseudouracil
  misc_difference 460: note = uracil or N1-methylpseudouracil
  misc_difference 461: note = uracil or N1-methylpseudouracil
  misc_difference 462: note = uracil or N1-methylpseudouracil
  misc_difference 465: note = uracil or N1-methylpseudouracil
  misc_difference 468: note = uracil or N1-methylpseudouracil
  misc_difference 475: note = uracil or N1-methylpseudouracil
  misc_difference 480: note = uracil or N1-methylpseudouracil
  misc_difference 487: note = uracil or N1-methylpseudouracil
  misc_difference 488: note = uracil or N1-methylpseudouracil
  misc_difference 490: note = uracil or N1-methylpseudouracil
  misc_difference 491: note = uracil or N1-methylpseudouracil
  misc_difference 494: note = uracil or N1-methylpseudouracil
  misc_difference 497: note = uracil or N1-methylpseudouracil
  misc_difference 499: note = uracil or N1-methylpseudouracil
  misc_difference 501: note = uracil or N1-methylpseudouracil
  misc_difference 503: note = uracil or N1-methylpseudouracil
  misc_difference 505: note = uracil or N1-methylpseudouracil
  misc_difference 506: note = uracil or N1-methylpseudouracil
  misc_difference 509: note = uracil or N1-methylpseudouracil
  misc_difference 515: note = uracil or N1-methylpseudouracil
  misc_difference 522: note = uracil or N1-methylpseudouracil
  misc_difference 525: note = uracil or N1-methylpseudouracil
  misc_difference 526: note = uracil or N1-methylpseudouracil
  misc_difference 528: note = uracil or N1-methylpseudouracil
  misc_difference 533: note = uracil or N1-methylpseudouracil
  misc_difference 539: note = uracil or N1-methylpseudouracil
  misc_difference 542: note = uracil or N1-methylpseudouracil
  misc_difference 543: note = uracil or N1-methylpseudouracil
  misc_difference 546: note = uracil or N1-methylpseudouracil
  misc_difference 549: note = uracil or N1-methylpseudouracil
  misc_difference 551: note = uracil or N1-methylpseudouracil
  misc_difference 553: note = uracil or N1-methylpseudouracil
  misc_difference 554: note = uracil or N1-methylpseudouracil
  misc_difference 563: note = uracil or N1-methylpseudouracil
  misc_difference 569: note = uracil or N1-methylpseudouracil
  misc_difference 585: note = uracil or N1-methylpseudouracil
  misc_difference 586: note = uracil or N1-methylpseudouracil
  misc_difference 587: note = uracil or N1-methylpseudouracil
  misc_difference 590: note = uracil or N1-methylpseudouracil
  misc_difference 599: note = uracil or N1-methylpseudouracil
  misc_difference 602: note = uracil or N1-methylpseudouracil
  misc_difference 608: note = uracil or N1-methylpseudouracil
  misc_difference 612: note = uracil or N1-methylpseudouracil
  misc_difference 613: note = uracil or N1-methylpseudouracil
  misc_difference 615: note = uracil or N1-methylpseudouracil
  misc_difference 616: note = uracil or N1-methylpseudouracil
  misc_difference 619: note = uracil or N1-methylpseudouracil
  misc_difference 620: note = uracil or N1-methylpseudouracil
  misc_difference 632: note = uracil or N1-methylpseudouracil
  misc_difference 633: note = uracil or N1-methylpseudouracil
  misc_difference 638: note = uracil or N1-methylpseudouracil
  misc_difference 640: note = uracil or N1-methylpseudouracil
  misc_difference 641: note = uracil or N1-methylpseudouracil
  misc_difference 642: note = uracil or N1-methylpseudouracil
  misc_difference 645: note = uracil or N1-methylpseudouracil
  misc_difference 650: note = uracil or N1-methylpseudouracil
  misc_difference 654: note = uracil or N1-methylpseudouracil
  misc_difference 657: note = uracil or N1-methylpseudouracil
  misc_difference 660: note = uracil or N1-methylpseudouracil
  misc_difference 662: note = uracil or N1-methylpseudouracil
  misc_difference 669: note = uracil or N1-methylpseudouracil
  misc_difference 676: note = uracil or N1-methylpseudouracil
  misc_difference 677: note = uracil or N1-methylpseudouracil
  misc_difference 679: note = uracil or N1-methylpseudouracil
  misc_difference 680: note = uracil or N1-methylpseudouracil
  misc_difference 684: note = uracil or N1-methylpseudouracil
  misc_difference 686: note = uracil or N1-methylpseudouracil
  misc_difference 687: note = uracil or N1-methylpseudouracil
  misc_difference 689: note = uracil or N1-methylpseudouracil
  misc_difference 690: note = uracil or N1-methylpseudouracil
  misc_difference 695: note = uracil or N1-methylpseudouracil
  misc_difference 697: note = uracil or N1-methylpseudouracil
  misc_difference 699: note = uracil or N1-methylpseudouracil
  misc_difference 700: note = uracil or N1-methylpseudouracil
  misc_difference 701: note = uracil or N1-methylpseudouracil
  misc_difference 703: note = uracil or N1-methylpseudouracil
  misc_difference 705: note = uracil or N1-methylpseudouracil
  misc_difference 709: note = uracil or N1-methylpseudouracil
  misc_difference 720: note = uracil or N1-methylpseudouracil
  misc_difference 728: note = uracil or N1-methylpseudouracil
  misc_difference 730: note = uracil or N1-methylpseudouracil
  misc_difference 738: note = uracil or N1-methylpseudouracil
  misc_difference 740: note = uracil or N1-methylpseudouracil
  misc_difference 743: note = uracil or N1-methylpseudouracil
  misc_difference 745: note = uracil or N1-methylpseudouracil
  misc_difference 747: note = uracil or N1-methylpseudouracil
  misc_difference 754: note = uracil or N1-methylpseudouracil
  misc_difference 755: note = uracil or N1-methylpseudouracil
  misc_difference 757: note = uracil or N1-methylpseudouracil
  misc_difference 775: note = uracil or N1-methylpseudouracil
  misc_difference 776: note = uracil or N1-methylpseudouracil
  misc_difference 777: note = uracil or N1-methylpseudouracil
  misc_difference 789: note = uracil or N1-methylpseudouracil
  misc_difference 806: note = uracil or N1-methylpseudouracil
  misc_difference 808: note = uracil or N1-methylpseudouracil
  misc_difference 809: note = uracil or N1-methylpseudouracil
  misc_difference 810: note = uracil or N1-methylpseudouracil
  misc_difference 814: note = uracil or N1-methylpseudouracil
  misc_difference 817: note = uracil or N1-methylpseudouracil
  misc_difference 818: note = uracil or N1-methylpseudouracil
  misc_difference 819: note = uracil or N1-methylpseudouracil
  misc_difference 824: note = uracil or N1-methylpseudouracil
  misc_difference 827: note = uracil or N1-methylpseudouracil
  misc_difference 830: note = uracil or N1-methylpseudouracil
  misc_difference 836: note = uracil or N1-methylpseudouracil
  misc_difference 846: note = uracil or N1-methylpseudouracil
  misc_difference 849: note = uracil or N1-methylpseudouracil
  misc_difference 852: note = uracil or N1-methylpseudouracil
  misc_difference 861: note = uracil or N1-methylpseudouracil
  misc_difference 864: note = uracil or N1-methylpseudouracil
  misc_difference 867: note = uracil or N1-methylpseudouracil
  misc_difference 871: note = uracil or N1-methylpseudouracil
  misc_difference 872: note = uracil or N1-methylpseudouracil
  misc_difference 875: note = uracil or N1-methylpseudouracil
  misc_difference 884: note = uracil or N1-methylpseudouracil
  misc_difference 892: note = uracil or N1-methylpseudouracil
  misc_difference 894: note = uracil or N1-methylpseudouracil
  misc_difference 896: note = uracil or N1-methylpseudouracil
  misc_difference 906: note = uracil or N1-methylpseudouracil
  misc_difference 916: note = uracil or N1-methylpseudouracil
  misc_difference 917: note = uracil or N1-methylpseudouracil
  misc_difference 920: note = uracil or N1-methylpseudouracil
  misc_difference 922: note = uracil or N1-methylpseudouracil
  misc_difference 925: note = uracil or N1-methylpseudouracil
  misc_difference 928: note = uracil or N1-methylpseudouracil
  misc_difference 929: note = uracil or N1-methylpseudouracil
  misc_difference 934: note = uracil or N1-methylpseudouracil
  misc_difference 939: note = uracil or N1-methylpseudouracil
  misc_difference 943: note = uracil or N1-methylpseudouracil
  misc_difference 947: note = uracil or N1-methylpseudouracil
  misc_difference 951: note = uracil or N1-methylpseudouracil
  misc_difference 955: note = uracil or N1-methylpseudouracil
  misc_difference 956: note = uracil or N1-methylpseudouracil
  misc_difference 957: note = uracil or N1-methylpseudouracil
  misc_difference 959: note = uracil or N1-methylpseudouracil
  misc_difference 962: note = uracil or N1-methylpseudouracil
  misc_difference 963: note = uracil or N1-methylpseudouracil
  misc_difference 964: note = uracil or N1-methylpseudouracil
  misc_difference 966: note = uracil or N1-methylpseudouracil
  misc_difference 972: note = uracil or N1-methylpseudouracil
  misc_difference 975: note = uracil or N1-methylpseudouracil
  misc_difference 978: note = uracil or N1-methylpseudouracil
  misc_difference 983: note = uracil or N1-methylpseudouracil
  misc_difference 993: note = uracil or N1-methylpseudouracil
  misc_difference 994: note = uracil or N1-methylpseudouracil
  misc_difference 996: note = uracil or N1-methylpseudouracil
  misc_difference 1003: note = uracil or N1-methylpseudouracil
  misc_difference 1005: note = uracil or N1-methylpseudouracil
  misc_difference 1007: note = uracil or N1-methylpseudouracil
  misc_difference 1014: note = uracil or N1-methylpseudouracil
  misc_difference 1016: note = uracil or N1-methylpseudouracil
  misc_difference 1019: note = uracil or N1-methylpseudouracil
  misc_difference 1021: note = uracil or N1-methylpseudouracil
  misc_difference 1025: note = uracil or N1-methylpseudouracil
  misc_difference 1033: note = uracil or N1-methylpseudouracil
  misc_difference 1038: note = uracil or N1-methylpseudouracil
  misc_difference 1040: note = uracil or N1-methylpseudouracil
  misc_difference 1046: note = uracil or N1-methylpseudouracil
  misc_difference 1049: note = uracil or N1-methylpseudouracil
  misc_difference 1053: note = uracil or N1-methylpseudouracil
  misc_difference 1057: note = uracil or N1-methylpseudouracil
  misc_difference 1061: note = uracil or N1-methylpseudouracil
  misc_difference 1064: note = uracil or N1-methylpseudouracil
  misc_difference 1067: note = uracil or N1-methylpseudouracil
  misc_difference 1068: note = uracil or N1-methylpseudouracil
  misc_difference 1071: note = uracil or N1-methylpseudouracil
  misc_difference 1086: note = uracil or N1-methylpseudouracil
  misc_difference 1095: note = uracil or N1-methylpseudouracil
  misc_difference 1102: note = uracil or N1-methylpseudouracil
  misc_difference 1104: note = uracil or N1-methylpseudouracil
  misc_difference 1113: note = uracil or N1-methylpseudouracil
  misc_difference 1114: note = uracil or N1-methylpseudouracil
  misc_difference 1120: note = uracil or N1-methylpseudouracil
  misc_difference 1121: note = uracil or N1-methylpseudouracil
  misc_difference 1137: note = uracil or N1-methylpseudouracil
  misc_difference 1146: note = uracil or N1-methylpseudouracil
  misc_difference 1149: note = uracil or N1-methylpseudouracil
  misc_difference 1150: note = uracil or N1-methylpseudouracil
  misc_difference 1151: note = uracil or N1-methylpseudouracil
  misc_difference 1154: note = uracil or N1-methylpseudouracil
  misc_difference 1158: note = uracil or N1-methylpseudouracil
  misc_difference 1159: note = uracil or N1-methylpseudouracil
  misc_difference 1160: note = uracil or N1-methylpseudouracil
  misc_difference 1163: note = uracil or N1-methylpseudouracil
  misc_difference 1170: note = uracil or N1-methylpseudouracil
  misc_difference 1172: note = uracil or N1-methylpseudouracil
  misc_difference 1179: note = uracil or N1-methylpseudouracil
  misc_difference 1185: note = uracil or N1-methylpseudouracil
  misc_difference 1192: note = uracil or N1-methylpseudouracil
  misc_difference 1196: note = uracil or N1-methylpseudouracil
  misc_difference 1197: note = uracil or N1-methylpseudouracil
  misc_difference 1198: note = uracil or N1-methylpseudouracil
  misc_difference 1199: note = uracil or N1-methylpseudouracil
  misc_difference 1209: note = uracil or N1-methylpseudouracil
atggcacacgctatggagaactcctggacaatcagtaaagagtaccatattgacgaagaagtgggctttgctttgccaaatccacaggagaatctaccagatttctataacgactggatgttcattgctaaacatttaccagatctcatagagtctggccagcttcgagaaagagttgagaagttaaacatgctcagcattgatcatctcacagaccacaagtcacagcgccttgcacgtctagttctgggatgcatcaccatggcatatgtgtggggcaaaggtcatggagatgtccgtaaggtcttgccaagaaatattgctgttccttactgccaactctccaagaaactggaactgcctcctattttggtttatgcagactgtgtcttggccaattggaagaagaaggatcctaataagcccctgacttatgagaacatggacgttttgttctcatttcgtgatggagactgcagtaaaggattcttcctcgtctctctattggtggaaatagcagctgcttctgcaatcaaagtaattcctactgtattcaaggcaatgcaaatgcaagaacgggacactttgctaaaggcgctgctggagatcgcttcttgcttggagaaagcccttcaagtgtttcatcaaatacatgatcatgtgaaccctaaggcattcttcagtgttcttcgcatatatttgtctggctggaaaggcaatccgcagctatcagacggtctggtgtatgaaggcttctgggaagacccaaaggagtttgcaggaggcagtgcaggccaaagcagcgtctttcagtgctttgacgtcctgctgggcatccagcagactgctggtggaggacatgctgctcagttcctccaggacatgagaagatatatgccaccagctcacaggaacttcctgtgctcattagagtcaaatccctcagtccgtgagtttgtcctttctaagggtgatgctggcctgcgggaagcttatgacgcctgtgtgaaagctctggtgtccctgaggagctaccatctgcaaatcgtgactaagtacatcctgattcctgcaagccagcagcctaaggagaataagacctctgaagacccttcaaagttggaggcaaagggcactggaggcactgatttaatgaatttcctgaagactgtaagaagtacaactgagaaatcccttttgaaggaaggt

SEQ ID NO: 8 - protein, 420 aa, synthetic construct
MLHFHYYDTSNKIMEPHRPNVKTAVPLSLESYHISEEYGFLLPDSLKELPDHYRPWMEIANKLPQLIDAHQLQAHVDKMPLLSCQFLKGHREQRLAHLVLSFLTMGYVWQEGEAQPAEVLPRNLALPFVEVSRNLGLPPILVHSDLVLTNWTKKDPDGFLEIGNLETIISFPGGESLHGFILVTALVEKEAVPGIKALVQATNAILQPNQEALLQALQRLRLSIQDITKTLGQMHDYVDPDIFYAGIRIFLSGWKDNPAMPAGLMYEGVSQEPLKYSGGSAAQSTVLHAFDEFLGIRHSKESGDFLYRMRDYMPPSHKAFIEDIHSAPSLRDYILSSGQDHLLTAYNQCVQALAELRSYHITMVTKYLITAAAKAKHGKPNHLPGPPQALKDRGTGGTAVMSFLKSVRDKTLESILHPRG

SEQ ID NO: 9 - RNA, 1260 nt, synthetic construct
  source 1..1260: mol_type = other RNA
  misc_difference 2: note = uracil or N1-methylpseudouracil
  misc_difference 5: note = uracil or N1-methylpseudouracil
  misc_difference 10: note = uracil or N1-methylpseudouracil
  misc_difference 11: note = uracil or N1-methylpseudouracil
  misc_difference 16: note = uracil or N1-methylpseudouracil
  misc_difference 19: note = uracil or N1-methylpseudouracil
  misc_difference 38: note = uracil or N1-methylpseudouracil
  misc_difference 41: note = uracil or N1-methylpseudouracil
  misc_difference 48: note = uracil or N1-methylpseudouracil
  misc_difference 57: note = uracil or N1-methylpseudouracil
  misc_difference 62: note = uracil or N1-methylpseudouracil
  misc_difference 74: note = uracil or N1-methylpseudouracil
  misc_difference 78: note = uracil or N1-methylpseudouracil
  misc_difference 80: note = uracil or N1-methylpseudouracil
  misc_difference 86: note = uracil or N1-methylpseudouracil
  misc_difference 87: note = uracil or N1-methylpseudouracil
  misc_difference 94: note = uracil or N1-methylpseudouracil
  misc_difference 101: note = uracil or N1-methylpseudouracil
  misc_difference 112: note = uracil or N1-methylpseudouracil
  misc_difference 118: note = uracil or N1-methylpseudouracil
  misc_difference 119: note = uracil or N1-methylpseudouracil
  misc_difference 122: note = uracil or N1-methylpseudouracil
  misc_difference 124: note = uracil or N1-methylpseudouracil
  misc_difference 125: note = uracil or N1-methylpseudouracil
  misc_difference 136: note = uracil or N1-methylpseudouracil
  misc_difference 137: note = uracil or N1-methylpseudouracil
  misc_difference 146: note = uracil or N1-methylpseudouracil
  misc_difference 157: note = uracil or N1-methylpseudouracil
  misc_difference 165: note = uracil or N1-methylpseudouracil
  misc_difference 166: note = uracil or N1-methylpseudouracil
  misc_difference 170: note = uracil or N1-methylpseudouracil
  misc_difference 176: note = uracil or N1-methylpseudouracil
  misc_difference 188: note = uracil or N1-methylpseudouracil
  misc_difference 192: note = uracil or N1-methylpseudouracil
  misc_difference 197: note = uracil or N1-methylpseudouracil
  misc_difference 200: note = uracil or N1-methylpseudouracil
  misc_difference 215: note = uracil or N1-methylpseudouracil
  misc_difference 227: note = uracil or N1-methylpseudouracil
  misc_difference 236: note = uracil or N1-methylpseudouracil
  misc_difference 240: note = uracil or N1-methylpseudouracil
  misc_difference 242: note = uracil or N1-methylpseudouracil
  misc_difference 245: note = uracil or N1-methylpseudouracil
  misc_difference 250: note = uracil or N1-methylpseudouracil
  misc_difference 256: note = uracil or N1-methylpseudouracil
  misc_difference 257: note = uracil or N1-methylpseudouracil
  misc_difference 260: note = uracil or N1-methylpseudouracil
  misc_difference 284: note = uracil or N1-methylpseudouracil
  misc_difference 293: note = uracil or N1-methylpseudouracil
  misc_difference 296: note = uracil or N1-methylpseudouracil
  misc_difference 299: note = uracil or N1-methylpseudouracil
  misc_difference 304: note = uracil or N1-methylpseudouracil
  misc_difference 305: note = uracil or N1-methylpseudouracil
  misc_difference 308: note = uracil or N1-methylpseudouracil
  misc_difference 314: note = uracil or N1-methylpseudouracil
  misc_difference 319: note = uracil or N1-methylpseudouracil
  misc_difference 323: note = uracil or N1-methylpseudouracil
  misc_difference 325: note = uracil or N1-methylpseudouracil
  misc_difference 348: note = uracil or N1-methylpseudouracil
  misc_difference 356: note = uracil or N1-methylpseudouracil
  misc_difference 359: note = uracil or N1-methylpseudouracil
  misc_difference 363: note = uracil or N1-methylpseudouracil
  misc_difference 371: note = uracil or N1-methylpseudouracil
  misc_difference 377: note = uracil or N1-methylpseudouracil
  misc_difference 381: note = uracil or N1-methylpseudouracil
  misc_difference 382: note = uracil or N1-methylpseudouracil
  misc_difference 383: note = uracil or N1-methylpseudouracil
  misc_difference 386: note = uracil or N1-methylpseudouracil
  misc_difference 392: note = uracil or N1-methylpseudouracil
  misc_difference 404: note = uracil or N1-methylpseudouracil
  misc_difference 410: note = uracil or N1-methylpseudouracil
  misc_difference 414: note = uracil or N1-methylpseudouracil
  misc_difference 417: note = uracil or N1-methylpseudouracil
  misc_difference 419: note = uracil or N1-methylpseudouracil
  misc_difference 422: note = uracil or N1-methylpseudouracil
  misc_difference 425: note = uracil or N1-methylpseudouracil
  misc_difference 435: note = uracil or N1-methylpseudouracil
  misc_difference 437: note = uracil or N1-methylpseudouracil
  misc_difference 438: note = uracil or N1-methylpseudouracil
  misc_difference 440: note = uracil or N1-methylpseudouracil
  misc_difference 442: note = uracil or N1-methylpseudouracil
  misc_difference 443: note = uracil or N1-methylpseudouracil
  misc_difference 451: note = uracil or N1-methylpseudouracil
  misc_difference 468: note = uracil or N1-methylpseudouracil
  misc_difference 475: note = uracil or N1-methylpseudouracil
  misc_difference 476: note = uracil or N1-methylpseudouracil
  misc_difference 478: note = uracil or N1-methylpseudouracil
  misc_difference 479: note = uracil or N1-methylpseudouracil
  misc_difference 485: note = uracil or N1-methylpseudouracil
  misc_difference 494: note = uracil or N1-methylpseudouracil
  misc_difference 503: note = uracil or N1-methylpseudouracil
  misc_difference 506: note = uracil or N1-methylpseudouracil
  misc_difference 507: note = uracil or N1-methylpseudouracil
  misc_difference 511: note = uracil or N1-methylpseudouracil
  misc_difference 512: note = uracil or N1-methylpseudouracil
  misc_difference 516: note = uracil or N1-methylpseudouracil
  misc_difference 530: note = uracil or N1-methylpseudouracil
  misc_difference 538: note = uracil or N1-methylpseudouracil
  misc_difference 539: note = uracil or N1-methylpseudouracil
  misc_difference 542: note = uracil or N1-methylpseudouracil
  misc_difference 545: note = uracil or N1-methylpseudouracil
  misc_difference 548: note = uracil or N1-methylpseudouracil
  misc_difference 557: note = uracil or N1-methylpseudouracil
  misc_difference 560: note = uracil or N1-methylpseudouracil
  misc_difference 575: note = uracil or N1-methylpseudouracil
  misc_difference 579: note = uracil or N1-methylpseudouracil
  misc_difference 584: note = uracil or N1-methylpseudouracil
  misc_difference 593: note = uracil or N1-methylpseudouracil
  misc_difference 596: note = uracil or N1-methylpseudouracil
  misc_difference 614: note = uracil or N1-methylpseudouracil
  misc_difference 617: note = uracil or N1-methylpseudouracil
  misc_difference 624: note = uracil or N1-methylpseudouracil
  misc_difference 638: note = uracil or N1-methylpseudouracil
  misc_difference 641: note = uracil or N1-methylpseudouracil
  misc_difference 642: note = uracil or N1-methylpseudouracil
  misc_difference 648: note = uracil or N1-methylpseudouracil
  misc_difference 650: note = uracil or N1-methylpseudouracil
  misc_difference 659: note = uracil or N1-methylpseudouracil
  misc_difference 665: note = uracil or N1-methylpseudouracil
  misc_difference 671: note = uracil or N1-methylpseudouracil
  misc_difference 680: note = uracil or N1-methylpseudouracil
  misc_difference 692: note = uracil or N1-methylpseudouracil
  misc_difference 701: note = uracil or N1-methylpseudouracil
  misc_difference 709: note = uracil or N1-methylpseudouracil
  misc_difference 713: note = uracil or N1-methylpseudouracil
  misc_difference 717: note = uracil or N1-methylpseudouracil
  misc_difference 720: note = uracil or N1-methylpseudouracil
  misc_difference 723: note = uracil or N1-methylpseudouracil
  misc_difference 725: note = uracil or N1-methylpseudouracil
  misc_difference 727: note = uracil or N1-methylpseudouracil
  misc_difference 728: note = uracil or N1-methylpseudouracil
  misc_difference 730: note = uracil or N1-methylpseudouracil
  misc_difference 740: note = uracil or N1-methylpseudouracil
  misc_difference 746: note = uracil or N1-methylpseudouracil
  misc_difference 748: note = uracil or N1-methylpseudouracil
  misc_difference 749: note = uracil or N1-methylpseudouracil
  misc_difference 752: note = uracil or N1-methylpseudouracil
  misc_difference 760: note = uracil or N1-methylpseudouracil
  misc_difference 774: note = uracil or N1-methylpseudouracil
  misc_difference 779: note = uracil or N1-methylpseudouracil
  misc_difference 783: note = uracil or N1-methylpseudouracil
  misc_difference 791: note = uracil or N1-methylpseudouracil
  misc_difference 794: note = uracil or N1-methylpseudouracil
  misc_difference 796: note = uracil or N1-methylpseudouracil
  misc_difference 806: note = uracil or N1-methylpseudouracil
  misc_difference 819: note = uracil or N1-methylpseudouracil
  misc_difference 821: note = uracil or N1-methylpseudouracil
  misc_difference 826: note = uracil or N1-methylpseudouracil
  misc_difference 857: note = uracil or N1-methylpseudouracil
  misc_difference 860: note = uracil or N1-methylpseudouracil
  misc_difference 868: note = uracil or N1-methylpseudouracil
  misc_difference 869: note = uracil or N1-methylpseudouracil
  misc_difference 877: note = uracil or N1-methylpseudouracil
  misc_difference 878: note = uracil or N1-methylpseudouracil
  misc_difference 881: note = uracil or N1-methylpseudouracil
  misc_difference 885: note = uracil or N1-methylpseudouracil
  misc_difference 887: note = uracil or N1-methylpseudouracil
  misc_difference 888: note = uracil or N1-methylpseudouracil
  misc_difference 913: note = uracil or N1-methylpseudouracil
  misc_difference 914: note = uracil or N1-methylpseudouracil
  misc_difference 917: note = uracil or N1-methylpseudouracil
  misc_difference 919: note = uracil or N1-methylpseudouracil
  misc_difference 926: note = uracil or N1-methylpseudouracil
  misc_difference 934: note = uracil or N1-methylpseudouracil
  misc_difference 938: note = uracil or N1-methylpseudouracil
  misc_difference 958: note = uracil or N1-methylpseudouracil
  misc_difference 959: note = uracil or N1-methylpseudouracil
  misc_difference 962: note = uracil or N1-methylpseudouracil
  misc_difference 971: note = uracil or N1-methylpseudouracil
  misc_difference 984: note = uracil or N1-methylpseudouracil
  misc_difference 989: note = uracil or N1-methylpseudouracil
  misc_difference 997: note = uracil or N1-methylpseudouracil
  misc_difference 999: note = uracil or N1-methylpseudouracil
  misc_difference 1001: note = uracil or N1-methylpseudouracil
  misc_difference 1004: note = uracil or N1-methylpseudouracil
  misc_difference 1025: note = uracil or N1-methylpseudouracil
  misc_difference 1028: note = uracil or N1-methylpseudouracil
  misc_difference 1036: note = uracil or N1-methylpseudouracil
  misc_difference 1045: note = uracil or N1-methylpseudouracil
  misc_difference 1047: note = uracil or N1-methylpseudouracil
  misc_difference 1049: note = uracil or N1-methylpseudouracil
  misc_difference 1050: note = uracil or N1-methylpseudouracil
  misc_difference 1058: note = uracil or N1-methylpseudouracil
  misc_difference 1067: note = uracil or N1-methylpseudouracil
  misc_difference 1074: note = uracil or N1-methylpseudouracil
  misc_difference 1075: note = uracil or N1-methylpseudouracil
  misc_difference 1077: note = uracil or N1-methylpseudouracil
  misc_difference 1082: note = uracil or N1-methylpseudouracil
  misc_difference 1083: note = uracil or N1-methylpseudouracil
  misc_difference 1086: note = uracil or N1-methylpseudouracil
  misc_difference 1088: note = uracil or N1-methylpseudouracil
  misc_difference 1091: note = uracil or N1-methylpseudouracil
  misc_difference 1099: note = uracil or N1-methylpseudouracil
  misc_difference 1103: note = uracil or N1-methylpseudouracil
  misc_difference 1106: note = uracil or N1-methylpseudouracil
  misc_difference 1148: note = uracil or N1-methylpseudouracil
  misc_difference 1152: note = uracil or N1-methylpseudouracil
  misc_difference 1158: note = uracil or N1-methylpseudouracil
  misc_difference 1161: note = uracil or N1-methylpseudouracil
  misc_difference 1169: note = uracil or N1-methylpseudouracil
  misc_difference 1199: note = uracil or N1-methylpseudouracil
  misc_difference 1202: note = uracil or N1-methylpseudouracil
  misc_difference 1206: note = uracil or N1-methylpseudouracil
  misc_difference 1207: note = uracil or N1-methylpseudouracil
  misc_difference 1208: note = uracil or N1-methylpseudouracil
  misc_difference 1211: note = uracil or N1-methylpseudouracil
  misc_difference 1212: note = uracil or N1-methylpseudouracil
  misc_difference 1220: note = uracil or N1-methylpseudouracil
  misc_difference 1227: note = uracil or N1-methylpseudouracil
  misc_difference 1235: note = uracil or N1-methylpseudouracil
  misc_difference 1240: note = uracil or N1-methylpseudouracil
  misc_difference 1244: note = uracil or N1-methylpseudouracil
  misc_difference 1246: note = uracil or N1-methylpseudouracil
  misc_difference 1247: note = uracil or N1-methylpseudouracil
atgctccacttccactactacgacaccagcaacaagatcatggagcctcacagacctaacgtgaagaccgccgtgcctctcagccttgagagctaccacatcagcgaggagtacggcttcctcttaccagacagcttgaaggaactaccggaccactacagaccttggatggagatcgccaacaagctgcctcagctgatcgacgcccaccagctgcaggcccacgtggacaagatgcctctgctgagctgccagttcctgaagggccacagagagcagagactggcccacctggtcctcagcttcctgaccatgggctacgtgtggcaggagggcgaggcccagcctgccgaggtgctgcctagaaacctggccctgcctttcgtggaggtgagccggaacctgggcctgcctcctatcctggtgcacagcgatcttgtcttgacaaactggaccaagaaggaccctgacggattcttggagataggcaacctggaaacaatcattagcttccctggcggcgagagcctgcacggcttcatcctcgtgaccgccctggtggagaaggaggcagtacctggcatcaaggccctcgtgcaggccaccaacgccatcctgcagcctaaccaggaggccctgcttcaagctctccagcgactccgcctgagcatccaggacatcaccaagaccctgggccagatgcacgactacgtcgatcctgatatcttctacgccggcatcagaatcttcctgagcggctggaaggacaaccctgccatgcctgccggcctgatgtacgagggcgtgagccaggagcctctgaagtacagcggcggcagcgccgcccagagcaccgtgctgcacgccttcgacgagttcctgggtattcgccacagcaaggagagcggcgacttcctgtacagaatgagagactacatgccgccaagccacaaggccttcatcgaggacatccacagcgcccctagcctccgggactatatcctgagcagcggccaggaccacctgctgaccgcctacaaccagtgtgttcaggccctagccgagctgagaagttatcacattactatggtgaccaagtacctgatcaccgccgcagcaaaggccaagcacggcaagccaaaccacctccctggacctcctcaggcgctcaaggacagaggcaccggcggcacagcggtaatgagtttccttaagagcgtgagagataagaccctagagtccatcttgcacccgcggggc

SEQ ID NO: 10 - protein, 406 aa, synthetic construct
MSGCPFLGNNFGYTFKKLPVEGSEEDKSQTGVNRASKGGLIYGNYLHLEKVLNAQELQSETKGNKIHDEHLFIITHQAYELWFKQILWELDSVREIFQNGHVRDERNMLKVVSRMHRVSVILKLLVQQFSILETMTALDFNDFREYLSPASGFQSLQFRLLENKIGVLQNMRVPYNRRHYRDNFKGEENELLLKSEQEKTLLELVEAWLERTPGLEPHGFNFWGKLEKNITRGLEEEFIRIQAKEESEEKEEQVAEFQKQKEVLLSLFDEKRHEHLLSKGERRLSYRALQGALMIYFYREEPRFQVPFQLLTSLMDIDSLMTKWRYNHVCMVHRMLGSKAGTGGSSGYHYLRSTVSDRYKVFVDLFNLSTYLIPRHWIPKMNPTIHKFLYTAEYCDSSYFSSDESD

SEQ ID NO: 11 - RNA, 1218 nt, synthetic construct
  source 1..1218: mol_type = other RNA
  misc_difference 2: note = uracil or N1-methylpseudouracil
  misc_difference 6: note = uracil or N1-methylpseudouracil
  misc_difference 10: note = uracil or N1-methylpseudouracil
  misc_difference 16: note = uracil or N1-methylpseudouracil
  misc_difference 17: note = uracil or N1-methylpseudouracil
  misc_difference 19: note = uracil or N1-methylpseudouracil
  misc_difference 20: note = uracil or N1-methylpseudouracil
  misc_difference 31: note = uracil or N1-methylpseudouracil
  misc_difference 32: note = uracil or N1-methylpseudouracil
  misc_difference 33: note = uracil or N1-methylpseudouracil
  misc_difference 37: note = uracil or N1-methylpseudouracil
  misc_difference 39: note = uracil or N1-methylpseudouracil
  misc_difference 42: note = uracil or N1-methylpseudouracil
  misc_difference 43: note = uracil or N1-methylpseudouracil
  misc_difference 44: note = uracil or N1-methylpseudouracil
  misc_difference 45: note = uracil or N1-methylpseudouracil
  misc_difference 53: note = uracil or N1-methylpseudouracil
  misc_difference 59: note = uracil or N1-methylpseudouracil
  misc_difference 82: note = uracil or N1-methylpseudouracil
  misc_difference 93: note = uracil or N1-methylpseudouracil
  misc_difference 95: note = uracil or N1-methylpseudouracil
  misc_difference 99: note = uracil or N1-methylpseudouracil
  misc_difference 117: note = uracil or N1-methylpseudouracil
  misc_difference 119: note = uracil or N1-methylpseudouracil
  misc_difference 120: note = uracil or N1-methylpseudouracil
  misc_difference 122: note = uracil or N1-methylpseudouracil
  misc_difference 124: note = uracil or N1-methylpseudouracil
  misc_difference 133: note = uracil or N1-methylpseudouracil
  misc_difference 137: note = uracil or N1-methylpseudouracil
  misc_difference 141: note = uracil or N1-methylpseudouracil
  misc_difference 142: note = uracil or N1-methylpseudouracil
  misc_difference 143: note = uracil or N1-methylpseudouracil
  misc_difference 152: note = uracil or N1-methylpseudouracil
  misc_difference 153: note = uracil or N1-methylpseudouracil
  misc_difference 154: note = uracil or N1-methylpseudouracil
  misc_difference 155: note = uracil or N1-methylpseudouracil
  misc_difference 159: note = uracil or N1-methylpseudouracil
  misc_difference 170: note = uracil or N1-methylpseudouracil
  misc_difference 177: note = uracil or N1-methylpseudouracil
  misc_difference 192: note = uracil or N1-methylpseudouracil
  misc_difference 197: note = uracil or N1-methylpseudouracil
  misc_difference 201: note = uracil or N1-methylpseudouracil
  misc_difference 204: note = uracil or N1-methylpseudouracil
  misc_difference 210: note = uracil or N1-methylpseudouracil
  misc_difference 212: note = uracil or N1-methylpseudouracil
  misc_difference 214: note = uracil or N1-methylpseudouracil
  misc_difference 215: note = uracil or N1-methylpseudouracil
  misc_difference 218: note = uracil or N1-methylpseudouracil
  misc_difference 221: note = uracil or N1-methylpseudouracil
  misc_difference 225: note = uracil or N1-methylpseudouracil
  misc_difference 228: note = uracil or N1-methylpseudouracil
  misc_difference 234: note = uracil or N1-methylpseudouracil
  misc_difference 235: note = uracil or N1-methylpseudouracil
  misc_difference 237: note = uracil or N1-methylpseudouracil
  misc_difference 242: note = uracil or N1-methylpseudouracil
  misc_difference 244: note = uracil or N1-methylpseudouracil
  misc_difference 247: note = uracil or N1-methylpseudouracil
  misc_difference 248: note = uracil or N1-methylpseudouracil
  misc_difference 249: note = uracil or N1-methylpseudouracil
  misc_difference 257: note = uracil or N1-methylpseudouracil
  misc_difference 260: note = uracil or N1-methylpseudouracil
  misc_difference 262: note = uracil or N1-methylpseudouracil
  misc_difference 268: note = uracil or N1-methylpseudouracil
  misc_difference 269: note = uracil or N1-methylpseudouracil
  misc_difference 273: note = uracil or N1-methylpseudouracil
  misc_difference 274: note = uracil or N1-methylpseudouracil
  misc_difference 276: note = uracil or N1-methylpseudouracil
  misc_difference 278: note = uracil or N1-methylpseudouracil
  misc_difference 279: note = uracil or N1-methylpseudouracil
  misc_difference 287: note = uracil or N1-methylpseudouracil
  misc_difference 289: note = uracil or N1-methylpseudouracil
  misc_difference 290: note = uracil or N1-methylpseudouracil
  misc_difference 291: note = uracil or N1-methylpseudouracil
  misc_difference 297: note = uracil or N1-methylpseudouracil
  misc_difference 303: note = uracil or N1-methylpseudouracil
  misc_difference 305: note = uracil or N1-methylpseudouracil
  misc_difference 312: note = uracil or N1-methylpseudouracil
  misc_difference 323: note = uracil or N1-methylpseudouracil
  misc_difference 326: note = uracil or N1-methylpseudouracil
  misc_difference 327: note = uracil or N1-methylpseudouracil
  misc_difference 332: note = uracil or N1-methylpseudouracil
  misc_difference 333: note = uracil or N1-methylpseudouracil
  misc_difference 335: note = uracil or N1-methylpseudouracil
  misc_difference 336: note = uracil or N1-methylpseudouracil
  misc_difference 337: note = uracil or N1-methylpseudouracil
  misc_difference 339: note = uracil or N1-methylpseudouracil
  misc_difference 344: note = uracil or N1-methylpseudouracil
  misc_difference 353: note = uracil or N1-methylpseudouracil
  misc_difference 355: note = uracil or N1-methylpseudouracil
  misc_difference 359: note = uracil or N1-methylpseudouracil
  misc_difference 362: note = uracil or N1-methylpseudouracil
  misc_difference 365: note = uracil or N1-methylpseudouracil
  misc_difference 371: note = uracil or N1-methylpseudouracil
  misc_difference 374: note = uracil or N1-methylpseudouracil
  misc_difference 377: note = uracil or N1-methylpseudouracil
  misc_difference 385: note = uracil or N1-methylpseudouracil
  misc_difference 386: note = uracil or N1-methylpseudouracil
  misc_difference 387: note = uracil or N1-methylpseudouracil
  misc_difference 388: note = uracil or N1-methylpseudouracil
  misc_difference 392: note = uracil or N1-methylpseudouracil
  misc_difference 393: note = uracil or N1-methylpseudouracil
  misc_difference 395: note = uracil or N1-methylpseudouracil
  misc_difference 404: note = uracil or N1-methylpseudouracil
  misc_difference 412: note = uracil or N1-methylpseudouracil
  misc_difference 413: note = uracil or N1-methylpseudouracil
  misc_difference 418: note = uracil or N1-methylpseudouracil
  misc_difference 419: note = uracil or N1-methylpseudouracil
  misc_difference 423: note = uracil or N1-methylpseudouracil
  misc_difference 427: note = uracil or N1-methylpseudouracil
  misc_difference 428: note = uracil or N1-methylpseudouracil
  misc_difference 436: note = uracil or N1-methylpseudouracil
  misc_difference 439: note = uracil or N1-methylpseudouracil
  misc_difference 440: note = uracil or N1-methylpseudouracil
  misc_difference 442: note = uracil or N1-methylpseudouracil
  misc_difference 444: note = uracil or N1-methylpseudouracil
  misc_difference 451: note = uracil or N1-methylpseudouracil
  misc_difference 457: note = uracil or N1-methylpseudouracil
  misc_difference 458: note = uracil or N1-methylpseudouracil
  misc_difference 465: note = uracil or N1-methylpseudouracil
  misc_difference 466: note = uracil or N1-methylpseudouracil
  misc_difference 467: note = uracil or N1-methylpseudouracil
  misc_difference 472: note = uracil or N1-methylpseudouracil
  misc_difference 473: note = uracil or N1-methylpseudouracil
  misc_difference 479: note = uracil or N1-methylpseudouracil
  misc_difference 481: note = uracil or N1-methylpseudouracil
  misc_difference 482: note = uracil or N1-methylpseudouracil
  misc_difference 494: note = uracil or N1-methylpseudouracil
  misc_difference 498: note = uracil or N1-methylpseudouracil
  misc_difference 500: note = uracil or N1-methylpseudouracil
  misc_difference 501: note = uracil or N1-methylpseudouracil
  misc_difference 503: note = uracil or N1-methylpseudouracil
  misc_difference 504: note = uracil or N1-methylpseudouracil
  misc_difference 512: note = uracil or N1-methylpseudouracil
  misc_difference 518: note = uracil or N1-methylpseudouracil
  misc_difference 522: note = uracil or N1-methylpseudouracil
  misc_difference 523: note = uracil or N1-methylpseudouracil
  misc_difference 525: note = uracil or N1-methylpseudouracil
  misc_difference 537: note = uracil or N1-methylpseudouracil
  misc_difference 538: note = uracil or N1-methylpseudouracil
  misc_difference 540: note = uracil or N1-methylpseudouracil
  misc_difference 543: note = uracil or N1-methylpseudouracil
  misc_difference 546: note = uracil or N1-methylpseudouracil
  misc_difference 550: note = uracil or N1-methylpseudouracil
  misc_difference 551: note = uracil or N1-methylpseudouracil
  misc_difference 567: note = uracil or N1-methylpseudouracil
  misc_difference 572: note = uracil or N1-methylpseudouracil
  misc_difference 575: note = uracil or N1-methylpseudouracil
  misc_difference 578: note = uracil or N1-methylpseudouracil
  misc_difference 579: note = uracil or N1-methylpseudouracil
  misc_difference 583: note = uracil or N1-methylpseudouracil
  misc_difference 585: note = uracil or N1-methylpseudouracil
  misc_difference 602: note = uracil or N1-methylpseudouracil
  misc_difference 603: note = uracil or N1-methylpseudouracil
  misc_difference 605: note = uracil or N1-methylpseudouracil
  misc_difference 610: note = uracil or N1-methylpseudouracil
  misc_difference 611: note = uracil or N1-methylpseudouracil
  misc_difference 614: note = uracil or N1-methylpseudouracil
  misc_difference 622: note = uracil or N1-methylpseudouracil
  misc_difference 626: note = uracil or N1-methylpseudouracil
  misc_difference 636: note = uracil or N1-methylpseudouracil
  misc_difference 642: note = uracil or N1-methylpseudouracil
  misc_difference 643: note = uracil or N1-methylpseudouracil
  misc_difference 644: note = uracil or N1-methylpseudouracil
  misc_difference 654: note = uracil or N1-methylpseudouracil
  misc_difference 658: note = uracil or N1-methylpseudouracil
  misc_difference 659: note = uracil or N1-methylpseudouracil
  misc_difference 660: note = uracil or N1-methylpseudouracil
  misc_difference 664: note = uracil or N1-methylpseudouracil
  misc_difference 665: note = uracil or N1-methylpseudouracil
  misc_difference 667: note = uracil or N1-methylpseudouracil
  misc_difference 677: note = uracil or N1-methylpseudouracil
  misc_difference 678: note = uracil or N1-methylpseudouracil
  misc_difference 687: note = uracil or N1-methylpseudouracil
  misc_difference 689: note = uracil or N1-methylpseudouracil
  misc_difference 701: note = uracil or N1-methylpseudouracil
  misc_difference 712: note = uracil or N1-methylpseudouracil
  misc_difference 713: note = uracil or N1-methylpseudouracil
  misc_difference 716: note = uracil or N1-methylpseudouracil
  misc_difference 722: note = uracil or N1-methylpseudouracil
  misc_difference 723: note = uracil or N1-methylpseudouracil
  misc_difference 729: note = uracil or N1-methylpseudouracil
  misc_difference 739: note = uracil or N1-methylpseudouracil
  misc_difference 741: note = uracil or N1-methylpseudouracil
  misc_difference 761: note = uracil or N1-methylpseudouracil
  misc_difference 765: note = uracil or N1-methylpseudouracil
  misc_difference 769: note = uracil or N1-methylpseudouracil
  misc_difference 770: note = uracil or N1-methylpseudouracil
  misc_difference 771: note = uracil or N1-methylpseudouracil
  misc_difference 788: note = uracil or N1-methylpseudouracil
  misc_difference 791: note = uracil or N1-methylpseudouracil
  misc_difference 794: note = uracil or N1-methylpseudouracil
  misc_difference 796: note = uracil or N1-methylpseudouracil
  misc_difference 799: note = uracil or N1-methylpseudouracil
  misc_difference 800: note = uracil or N1-methylpseudouracil
  misc_difference 802: note = uracil or N1-methylpseudouracil
  misc_difference 803: note = uracil or N1-methylpseudouracil
  misc_difference 804: note = uracil or N1-methylpseudouracil
  misc_difference 807: note = uracil or N1-methylpseudouracil
  misc_difference 816: note = uracil or N1-methylpseudouracil
  misc_difference 827: note = uracil or N1-methylpseudouracil
  misc_difference 830: note = uracil or N1-methylpseudouracil
  misc_difference 831: note = uracil or N1-methylpseudouracil
  misc_difference 834: note = uracil or N1-methylpseudouracil
  misc_difference 840: note = uracil or N1-methylpseudouracil
  misc_difference 851: note = uracil or N1-methylpseudouracil
  misc_difference 853: note = uracil or N1-methylpseudouracil
  misc_difference 856: note = uracil or N1-methylpseudouracil
  misc_difference 866: note = uracil or N1-methylpseudouracil
  misc_difference 867: note = uracil or N1-methylpseudouracil
  misc_difference 877: note = uracil or N1-methylpseudouracil
  misc_difference 878: note = uracil or N1-methylpseudouracil
  misc_difference 881: note = uracil or N1-methylpseudouracil
  misc_difference 884: note = uracil or N1-methylpseudouracil
  misc_difference 886: note = uracil or N1-methylpseudouracil
  misc_difference 889: note = uracil or N1-methylpseudouracil
  misc_difference 890: note = uracil or N1-methylpseudouracil
  misc_difference 892: note = uracil or N1-methylpseudouracil
  misc_difference 906: note = uracil or N1-methylpseudouracil
  misc_difference 910: note = uracil or N1-methylpseudouracil
  misc_difference 911: note = uracil or N1-methylpseudouracil
  misc_difference 917: note = uracil or N1-methylpseudouracil
  misc_difference 921: note = uracil or N1-methylpseudouracil
  misc_difference 922: note = uracil or N1-methylpseudouracil
  misc_difference 923: note = uracil or N1-methylpseudouracil
  misc_difference 924: note = uracil or N1-methylpseudouracil
  misc_difference 928: note = uracil or N1-methylpseudouracil
  misc_difference 929: note = uracil or N1-methylpseudouracil
  misc_difference 932: note = uracil or N1-methylpseudouracil
  misc_difference 936: note = uracil or N1-methylpseudouracil
  misc_difference 937: note = uracil or N1-methylpseudouracil
  misc_difference 939: note = uracil or N1-methylpseudouracil
  misc_difference 941: note = uracil or N1-methylpseudouracil
  misc_difference 942: note = uracil or N1-methylpseudouracil
  misc_difference 944: note = uracil or N1-methylpseudouracil
  misc_difference 950: note = uracil or N1-methylpseudouracil
  misc_difference 954: note = uracil or N1-methylpseudouracil
  misc_difference 955: note = uracil or N1-methylpseudouracil
  misc_difference 959: note = uracil or N1-methylpseudouracil
  misc_difference 962: note = uracil or N1-methylpseudouracil
  misc_difference 970: note = uracil or N1-methylpseudouracil
  misc_difference 976: note = uracil or N1-methylpseudouracil
  misc_difference 978: note = uracil or N1-methylpseudouracil
  misc_difference 984: note = uracil or N1-methylpseudouracil
  misc_difference 986: note = uracil or N1-methylpseudouracil
  misc_difference 988: note = uracil or N1-methylpseudouracil
  misc_difference 992: note = uracil or N1-methylpseudouracil
  misc_difference 995: note = uracil or N1-methylpseudouracil
  misc_difference 1004: note = uracil or N1-methylpseudouracil
  misc_difference 1007: note = uracil or N1-methylpseudouracil
  misc_difference 1020: note = uracil or N1-methylpseudouracil
  misc_difference 1029: note = uracil or N1-methylpseudouracil
  misc_difference 1032: note = uracil or N1-methylpseudouracil
  misc_difference 1033: note = uracil or N1-methylpseudouracil
  misc_difference 1036: note = uracil or N1-methylpseudouracil
  misc_difference 1042: note = uracil or N1-methylpseudouracil
  misc_difference 1044: note = uracil or N1-methylpseudouracil
  misc_difference 1048: note = uracil or N1-methylpseudouracil
  misc_difference 1050: note = uracil or N1-methylpseudouracil
  misc_difference 1051: note = uracil or N1-methylpseudouracil
  misc_difference 1052: note = uracil or N1-methylpseudouracil
  misc_difference 1057: note = uracil or N1-methylpseudouracil
  misc_difference 1062: note = uracil or N1-methylpseudouracil
  misc_difference 1064: note = uracil or N1-methylpseudouracil
  misc_difference 1068: note = uracil or N1-methylpseudouracil
  misc_difference 1071: note = uracil or N1-methylpseudouracil
  misc_difference 1075: note = uracil or N1-methylpseudouracil
  misc_difference 1082: note = uracil or N1-methylpseudouracil
  misc_difference 1084: note = uracil or N1-methylpseudouracil
  misc_difference 1085: note = uracil or N1-methylpseudouracil
  misc_difference 1088: note = uracil or N1-methylpseudouracil
  misc_difference 1092: note = uracil or N1-methylpseudouracil
  misc_difference 1094: note = uracil or N1-methylpseudouracil
  misc_difference 1095: note = uracil or N1-methylpseudouracil
  misc_difference 1096: note = uracil or N1-methylpseudouracil
  misc_difference 1097: note = uracil or N1-methylpseudouracil
  misc_difference 1101: note = uracil or N1-methylpseudouracil
  misc_difference 1103: note = uracil or N1-methylpseudouracil
  misc_difference 1104: note = uracil or N1-methylpseudouracil
  misc_difference 1105: note = uracil or N1-methylpseudouracil
  misc_difference 1111: note = uracil or N1-methylpseudouracil
  misc_difference 1115: note = uracil or N1-methylpseudouracil
  misc_difference 1118: note = uracil or N1-methylpseudouracil
  misc_difference 1119: note = uracil or N1-methylpseudouracil
  misc_difference 1129: note = uracil or N1-methylpseudouracil
  misc_difference 1133: note = uracil or N1-methylpseudouracil
  misc_difference 1142: note = uracil or N1-methylpseudouracil
  misc_difference 1154: note = uracil or N1-methylpseudouracil
  misc_difference 1155: note = uracil or N1-methylpseudouracil
  misc_difference 1162: note = uracil or N1-methylpseudouracil
  misc_difference 1163: note = uracil or N1-methylpseudouracil
  misc_difference 1164: note = uracil or N1-methylpseudouracil
  misc_difference 1166: note = uracil or N1-methylpseudouracil
  misc_difference 1168: note = uracil or N1-methylpseudouracil
  misc_difference 1170: note = uracil or N1-methylpseudouracil
  misc_difference 1180: note = uracil or N1-methylpseudouracil
  misc_difference 1183: note = uracil or N1-methylpseudouracil
  misc_difference 1185: note = uracil or N1-methylpseudouracil
  misc_difference 1188: note = uracil or N1-methylpseudouracil
  misc_difference 1192: note = uracil or N1-methylpseudouracil
  misc_difference 1195: note = uracil or N1-methylpseudouracil
  misc_difference 1198: note = uracil or N1-methylpseudouracil
  misc_difference 1199: note = uracil or N1-methylpseudouracil
  misc_difference 1206: note = uracil or N1-methylpseudouracil
  misc_difference 1209: note = uracil or N1-methylpseudouracil
  misc_difference 1213: note = uracil or N1-methylpseudouracil
  misc_difference 1218: note = uracil or N1-methylpseudouracil
atgagtgggtgcccattcttaggaaacaactttggatatacttttaagaaactccccgtagaaggcagcgaagaagacaaatcacaaaccggtgtgaatagagccagcaaaggaggtcttatctacgggaactacctccatttggagaaagttttgaatgcacaagaactgcaaagtgaaaccaagggaaataagatccatgatgaacatctcttcatcataactcatcaagcttatgaactctggtttaagcaaatcctctgggagttggattctgttcgagagatctttcagaatggccatgtcagagatgaaaggaacatgcttaaggttgtttctcggatgcaccgagtgtcagtgatcctgaaactgctggtgcagcagttttccattctggagacgatgacagccttggacttcaatgacttcagagagtacttatctccagcatcaggcttccagagtttgcaattccgactattagagaacaagataggtgttcttcagaacatgagagtcccttataacagaagacattatcgtgataacttcaaaggagaagagaatgaactgctacttaaatctgagcaggagaagacacttctggaattagtggaggcatggctggaaagaactccaggtttagagccacatggatttaacttctggggaaagcttgagaagaatatcaccagaggcctggaagaggaattcataaggattcaggctaaagaagagtctgaagagaaagaggaacaggtggctgaatttcagaagcagaaggaggtgctactgtccttatttgatgagaaacgtcacgaacacctccttagtaaaggtgaaagacggctgtcatacagagcacttcagggagcattgatgatatacttctacagggaggagcctaggttccaggtgccttttcagttgctgacttctcttatggacatagattcactgatgaccaaatggagatataaccatgtgtgcatggtgcacagaatgctgggcagcaaagctggcaccggtggttcctcaggctatcactatttacgatcaactgtgagtgataggtacaaggtcttcgtcgatcttttcaatctttcaacatacctgattccccgacactggataccgaagatgaacccaaccattcacaaatttctatatacagcagaatactgtgatagctcctacttcagcagtgatgaatcagat

SEQ ID NO: 12 - protein, 440 aa, synthetic construct
MGSSKSKPKDPSQRRRGGGSSGCPFLGNNFGYTFKKLPVEGSEEDKSQTGVNRASKGGLIYGNYLHLEKVLNAQELQSETKGNKIHDEHLFIITHQAYELWFKQILWELDSVREIFQNGHVRDERNMLKVVSRMHRVSVILKLLVQQFSILETMTALDFNDFREYLSPASGFQSLQFRLLENKIGVLQNMRVPYNRRHYRDNFKGEENELLLKSEQEKTLLELVEAWLERTPGLEPHGFNFWGKLEKNITRGLEEEFIRIQAKEESEEKEEQVAEFQKQKEVLLSLFDEKRHEHLLSKGERRLSYRALQGALMIYFYREEPRFQVPFQLLTSLMDIDSLMTKWRYNHVCMVHRMLGSKAGTGGSSGYHYLRSTVSDRYKVFVDLFNLSTYLIPRHWIPKMNPTIHKFLYTAEYCDSSYFSSDESDGGKPIPNPLLGLDST

SEQ ID NO: 13 - RNA, 1320 nt, synthetic construct
  source 1..1320: mol_type = other RNA
  misc_difference 2: note = uracil or N1-methylpseudouracil
  misc_difference 24: note = uracil or N1-methylpseudouracil
  misc_difference 33: note = uracil or N1-methylpseudouracil
  misc_difference 58: note = uracil or N1-methylpseudouracil
  misc_difference 61: note = uracil or N1-methylpseudouracil
  misc_difference 67: note = uracil or N1-methylpseudouracil
  misc_difference 72: note = uracil or N1-methylpseudouracil
  misc_difference 73: note = uracil or N1-methylpseudouracil
  misc_difference 74: note = uracil or N1-methylpseudouracil
  misc_difference 77: note = uracil or N1-methylpseudouracil
  misc_difference 88: note = uracil or N1-methylpseudouracil
  misc_difference 89: note = uracil or N1-methylpseudouracil
  misc_difference 94: note = uracil or N1-methylpseudouracil
  misc_difference 100: note = uracil or N1-methylpseudouracil
  misc_difference 101: note = uracil or N1-methylpseudouracil
  misc_difference 110: note = uracil or N1-methylpseudouracil
  misc_difference 114: note = uracil or N1-methylpseudouracil
  misc_difference 116: note = uracil or N1-methylpseudouracil
  misc_difference 152: note = uracil or N1-methylpseudouracil
  misc_difference 176: note = uracil or N1-methylpseudouracil
  misc_difference 179: note = uracil or N1-methylpseudouracil
  misc_difference 181: note = uracil or N1-methylpseudouracil
  misc_difference 190: note = uracil or N1-methylpseudouracil
  misc_difference 194: note = uracil or N1-methylpseudouracil
  misc_difference 200: note = uracil or N1-methylpseudouracil
  misc_difference 209: note = uracil or N1-methylpseudouracil
  misc_difference 212: note = uracil or N1-methylpseudouracil
  misc_difference 227: note = uracil or N1-methylpseudouracil
  misc_difference 240: note = uracil or N1-methylpseudouracil
  misc_difference 246: note = uracil or N1-methylpseudouracil
  misc_difference 254: note = uracil or N1-methylpseudouracil
  misc_difference 269: note = uracil or N1-methylpseudouracil
  misc_difference 271: note = uracil or N1-methylpseudouracil
  misc_difference 272: note = uracil or N1-methylpseudouracil
  misc_difference 275: note = uracil or N1-methylpseudouracil
  misc_difference 278: note = uracil or N1-methylpseudouracil
  misc_difference 292: note = uracil or N1-methylpseudouracil
  misc_difference 299: note = uracil or N1-methylpseudouracil
  misc_difference 301: note = uracil or N1-methylpseudouracil
  misc_difference 304: note = uracil or N1-methylpseudouracil
  misc_difference 305: note = uracil or N1-methylpseudouracil
  misc_difference 314: note = uracil or N1-methylpseudouracil
  misc_difference 317: note = uracil or N1-methylpseudouracil
  misc_difference 319: note = uracil or N1-methylpseudouracil
  misc_difference 326: note = uracil or N1-methylpseudouracil
  misc_difference 335: note = uracil or N1-methylpseudouracil
  misc_difference 344: note = uracil or N1-methylpseudouracil
  misc_difference 346: note = uracil or N1-methylpseudouracil
  misc_difference 347: note = uracil or N1-methylpseudouracil
  misc_difference 362: note = uracil or N1-methylpseudouracil
  misc_difference 380: note = uracil or N1-methylpseudouracil
  misc_difference 383: note = uracil or N1-methylpseudouracil
  misc_difference 389: note = uracil or N1-methylpseudouracil
  misc_difference 392: note = uracil or N1-methylpseudouracil
  misc_difference 401: note = uracil or N1-methylpseudouracil
  misc_difference 410: note = uracil or N1-methylpseudouracil
  misc_difference 416: note = uracil or N1-methylpseudouracil
  misc_difference 419: note = uracil or N1-methylpseudouracil
  misc_difference 422: note = uracil or N1-methylpseudouracil
  misc_difference 428: note = uracil or N1-methylpseudouracil
  misc_difference 431: note = uracil or N1-methylpseudouracil
  misc_difference 434: note = uracil or N1-methylpseudouracil
  misc_difference 442: note = uracil or N1-methylpseudouracil
  misc_difference 443: note = uracil or N1-methylpseudouracil
  misc_difference 449: note = uracil or N1-methylpseudouracil
  misc_difference 452: note = uracil or N1-methylpseudouracil
  misc_difference 461: note = uracil or N1-methylpseudouracil
  misc_difference 470: note = uracil or N1-methylpseudouracil
  misc_difference 475: note = uracil or N1-methylpseudouracil
  misc_difference 476: note = uracil or N1-methylpseudouracil
  misc_difference 484: note = uracil or N1-methylpseudouracil
  misc_difference 485: note = uracil or N1-methylpseudouracil
  misc_difference 493: note = uracil or N1-methylpseudouracil
  misc_difference 497: note = uracil or N1-methylpseudouracil
  misc_difference 504: note = uracil or N1-methylpseudouracil
  misc_difference 514: note = uracil or N1-methylpseudouracil
  misc_difference 515: note = uracil or N1-methylpseudouracil
  misc_difference 524: note = uracil or N1-methylpseudouracil
  misc_difference 525: note = uracil or N1-methylpseudouracil
  misc_difference 529: note = uracil or N1-methylpseudouracil
  misc_difference 530: note = uracil or N1-methylpseudouracil
  misc_difference 536: note = uracil or N1-methylpseudouracil
  misc_difference 539: note = uracil or N1-methylpseudouracil
  misc_difference 546: note = uracil or N1-methylpseudouracil
  misc_difference 551: note = uracil or N1-methylpseudouracil
  misc_difference 557: note = uracil or N1-methylpseudouracil
  misc_difference 560: note = uracil or N1-methylpseudouracil
  misc_difference 569: note = uracil or N1-methylpseudouracil
  misc_difference 575: note = uracil or N1-methylpseudouracil
  misc_difference 579: note = uracil or N1-methylpseudouracil
  misc_difference 580: note = uracil or N1-methylpseudouracil
  misc_difference 595: note = uracil or N1-methylpseudouracil
  misc_difference 607: note = uracil or N1-methylpseudouracil
  misc_difference 608: note = uracil or N1-methylpseudouracil
  misc_difference 629: note = uracil or N1-methylpseudouracil
  misc_difference 632: note = uracil or N1-methylpseudouracil
  misc_difference 635: note = uracil or N1-methylpseudouracil
  misc_difference 659: note = uracil or N1-methylpseudouracil
  misc_difference 661: note = uracil or N1-methylpseudouracil
  misc_difference 662: note = uracil or N1-methylpseudouracil
  misc_difference 668: note = uracil or N1-methylpseudouracil
  misc_difference 671: note = uracil or N1-methylpseudouracil
  misc_difference 679: note = uracil or N1-methylpseudouracil
  misc_difference 683: note = uracil or N1-methylpseudouracil
  misc_difference 696: note = uracil or N1-methylpseudouracil
  misc_difference 701: note = uracil or N1-methylpseudouracil
  misc_difference 708: note = uracil or N1-methylpseudouracil
  misc_difference 715: note = uracil or N1-methylpseudouracil
  misc_difference 716: note = uracil or N1-methylpseudouracil
  misc_difference 721: note = uracil or N1-methylpseudouracil
  misc_difference 722: note = uracil or N1-methylpseudouracil
  misc_difference 724: note = uracil or N1-methylpseudouracil
  misc_difference 734: note = uracil or N1-methylpseudouracil
  misc_difference 735: note = uracil or N1-methylpseudouracil
  misc_difference 746: note = uracil or N1-methylpseudouracil
  misc_difference 758: note = uracil or N1-methylpseudouracil
  misc_difference 769: note = uracil or N1-methylpseudouracil
  misc_difference 770: note = uracil or N1-methylpseudouracil
  misc_difference 773: note = uracil or N1-methylpseudouracil
  misc_difference 779: note = uracil or N1-methylpseudouracil
  misc_difference 796: note = uracil or N1-methylpseudouracil
  misc_difference 818: note = uracil or N1-methylpseudouracil
  misc_difference 826: note = uracil or N1-methylpseudouracil
  misc_difference 827: note = uracil or N1-methylpseudouracil
  misc_difference 845: note = uracil or N1-methylpseudouracil
  misc_difference 848: note = uracil or N1-methylpseudouracil
  misc_difference 851: note = uracil or N1-methylpseudouracil
  misc_difference 857: note = uracil or N1-methylpseudouracil
  misc_difference 859: note = uracil or N1-methylpseudouracil
  misc_difference 860: note = uracil or N1-methylpseudouracil
  misc_difference 884: note = uracil or N1-methylpseudouracil
  misc_difference 887: note = uracil or N1-methylpseudouracil
  misc_difference 889: note = uracil or N1-methylpseudouracil
  misc_difference 908: note = uracil or N1-methylpseudouracil
  misc_difference 913: note = uracil or N1-methylpseudouracil
  misc_difference 918: note = uracil or N1-methylpseudouracil
  misc_difference 921: note = uracil or N1-methylpseudouracil
  misc_difference 922: note = uracil or N1-methylpseudouracil
  misc_difference 923: note = uracil or N1-methylpseudouracil
  misc_difference 935: note = uracil or N1-methylpseudouracil
  misc_difference 938: note = uracil or N1-methylpseudouracil
  misc_difference 941: note = uracil or N1-methylpseudouracil
  misc_difference 943: note = uracil or N1-methylpseudouracil
  misc_difference 946: note = uracil or N1-methylpseudouracil
  misc_difference 947: note = uracil or N1-methylpseudouracil
  misc_difference 949: note = uracil or N1-methylpseudouracil
  misc_difference 963: note = uracil or N1-methylpseudouracil
  misc_difference 967: note = uracil or N1-methylpseudouracil
  misc_difference 968: note = uracil or N1-methylpseudouracil
  misc_difference 974: note = uracil or N1-methylpseudouracil
  misc_difference 978: note = uracil or N1-methylpseudouracil
  misc_difference 979: note = uracil or N1-methylpseudouracil
  misc_difference 980: note = uracil or N1-methylpseudouracil
  misc_difference 986: note = uracil or N1-methylpseudouracil
  misc_difference 989: note = uracil or N1-methylpseudouracil
  misc_difference 998: note = uracil or N1-methylpseudouracil
  misc_difference 1001: note = uracil or N1-methylpseudouracil
  misc_difference 1007: note = uracil or N1-methylpseudouracil
  misc_difference 1012: note = uracil or N1-methylpseudouracil
  misc_difference 1014: note = uracil or N1-methylpseudouracil
  misc_difference 1015: note = uracil or N1-methylpseudouracil
  misc_difference 1016: note = uracil or N1-methylpseudouracil
  misc_difference 1019: note = uracil or N1-methylpseudouracil
  misc_difference 1027: note = uracil or N1-methylpseudouracil
  misc_difference 1033: note = uracil or N1-methylpseudouracil
  misc_difference 1043: note = uracil or N1-methylpseudouracil
  misc_difference 1045: note = uracil or N1-methylpseudouracil
  misc_difference 1049: note = uracil or N1-methylpseudouracil
  misc_difference 1052: note = uracil or N1-methylpseudouracil
  misc_difference 1061: note = uracil or N1-methylpseudouracil
  misc_difference 1064: note = uracil or N1-methylpseudouracil
  misc_difference 1069: note = uracil or N1-methylpseudouracil
  misc_difference 1086: note = uracil or N1-methylpseudouracil
  misc_difference 1089: note = uracil or N1-methylpseudouracil
  misc_difference 1093: note = uracil or N1-methylpseudouracil
  misc_difference 1099: note = uracil or N1-methylpseudouracil
  misc_difference 1105: note = uracil or N1-methylpseudouracil
  misc_difference 1109: note = uracil or N1-methylpseudouracil
  misc_difference 1121: note = uracil or N1-methylpseudouracil
  misc_difference 1132: note = uracil or N1-methylpseudouracil
  misc_difference 1139: note = uracil or N1-methylpseudouracil
  misc_difference 1141: note = uracil or N1-methylpseudouracil
  misc_difference 1142: note = uracil or N1-methylpseudouracil
  misc_difference 1145: note = uracil or N1-methylpseudouracil
  misc_difference 1151: note = uracil or N1-methylpseudouracil
  misc_difference 1153: note = uracil or N1-methylpseudouracil
  misc_difference 1154: note = uracil or N1-methylpseudouracil
  misc_difference 1160: note = uracil or N1-methylpseudouracil
  misc_difference 1168: note = uracil or N1-methylpseudouracil
  misc_difference 1172: note = uracil or N1-methylpseudouracil
  misc_difference 1175: note = uracil or N1-methylpseudouracil
  misc_difference 1179: note = uracil or N1-methylpseudouracil
  misc_difference 1186: note = uracil or N1-methylpseudouracil
  misc_difference 1190: note = uracil or N1-methylpseudouracil
  misc_difference 1194: note = uracil or N1-methylpseudouracil
  misc_difference 1199: note = uracil or N1-methylpseudouracil
  misc_difference 1206: note = uracil or N1-methylpseudouracil
  misc_difference 1211: note = uracil or N1-methylpseudouracil
  misc_difference 1219: note = uracil or N1-methylpseudouracil
  misc_difference 1220: note = uracil or N1-methylpseudouracil
  misc_difference 1223: note = uracil or N1-methylpseudouracil
  misc_difference 1225: note = uracil or N1-methylpseudouracil
  misc_difference 1237: note = uracil or N1-methylpseudouracil
  misc_difference 1240: note = uracil or N1-methylpseudouracil
  misc_difference 1252: note = uracil or N1-methylpseudouracil
  misc_difference 1255: note = uracil or N1-methylpseudouracil
  misc_difference 1256: note = uracil or N1-methylpseudouracil
  misc_difference 1287: note = uracil or N1-methylpseudouracil
  misc_difference 1289: note = uracil or N1-methylpseudouracil
  misc_difference 1293: note = uracil or N1-methylpseudouracil
  misc_difference 1299: note = uracil or N1-methylpseudouracil
  misc_difference 1301: note = uracil or N1-methylpseudouracil
  misc_difference 1304: note = uracil or N1-methylpseudouracil
  misc_difference 1310: note = uracil or N1-methylpseudouracil
atgggcagcagcaagagcaagcctaaggaccctagccagagaagaagaggcggcggctcatccggctgccctttcctgggcaacaacttcggctacaccttcaagaagctgcctgtggagggcagcgaggaggacaagagccagaccggcgtgaacagagccagcaagggcggcctgatctacggcaactacctgcacctggagaaggtgctgaacgcccaggagctgcagagcgaaactaagggtaacaagatccacgacgagcacctgttcatcatcacccaccaggcctacgagctgtggttcaagcagatcctgtgggagctggacagcgtgagagagatcttccagaacggccacgtcagggacgagagaaacatgctgaaggtggtgagcagaatgcacagagtgagcgtgatcctgaagctgctggtgcagcagttcagcatcctggaaacaatgaccgccctggacttcaacgacttcagagagtacctgagccctgccagcggcttccagagccttcagttcagactgctggagaataagatcggcgtgctgcagaacatgagagtgccttacaacagaagacactacagagacaacttcaagggcgaggagaacgagctgctgctcaagagcgagcaggagaagaccctcttggaactggtggaggcctggctggagagaacccctggcctggagcctcacggcttcaacttctggggcaagcttgagaagaacatcaccagaggactcgaagaggagttcatcagaatccaggccaaggaggagtcagaggagaaggaggaacaggtggccgagttccagaagcagaaggaagtgctgctaagcctgttcgacgagaagagacacgaacacctgctgtcgaagggagaaagaagactgagctaccgtgctttgcagggcgccctgatgatctacttctacagggaggagcctagattccaggtgcctttccagctgctgaccagcctgatggacatcgactctttgatgaccaagtggagatacaaccacgtgtgcatggtgcacagaatgctcggctccaaggccggcaccggtggtagctccggataccactacctgagaagcaccgtgagcgacagatacaaggtgttcgtggacctcttcaacctcagcacctacctgatccctagacactggatccctaagatgaaccctaccatccacaagttcctgtacaccgccgagtactgcgacagcagctacttcagcagcgacgagagcgacggcggcaagcctatccctaaccctctgctgggcctggacagcacc

SEQ ID NO: 14 - RNA, 1320 nt, synthetic construct
  source 1..1320: mol_type = other RNA
  misc_difference 2: note = uracil or N1-methylpseudouracil
  misc_difference 16: note = uracil or N1-methylpseudouracil
  misc_difference 33: note = uracil or N1-methylpseudouracil
  misc_difference 34: note = uracil or N1-methylpseudouracil
  misc_difference 51: note = uracil or N1-methylpseudouracil
  misc_difference 58: note = uracil or N1-methylpseudouracil
  misc_difference 60: note = uracil or N1-methylpseudouracil
  misc_difference 67: note = uracil or N1-methylpseudouracil
  misc_difference 73: note = uracil or N1-methylpseudouracil
  misc_difference 74: note = uracil or N1-methylpseudouracil
  misc_difference 77: note = uracil or N1-methylpseudouracil
  misc_difference 88: note = uracil or N1-methylpseudouracil
  misc_difference 89: note = uracil or N1-methylpseudouracil
  misc_difference 94: note = uracil or N1-methylpseudouracil
  misc_difference 100: note = uracil or N1-methylpseudouracil
  misc_difference 101: note = uracil or N1-methylpseudouracil
  misc_difference 110: note = uracil or N1-methylpseudouracil
  misc_difference 116: note = uracil or N1-methylpseudouracil
  misc_difference 139: note = uracil or N1-methylpseudouracil
  misc_difference 152: note = uracil or N1-methylpseudouracil
  misc_difference 171: note = uracil or N1-methylpseudouracil
  misc_difference 176: note = uracil or N1-methylpseudouracil
  misc_difference 179: note = uracil or N1-methylpseudouracil
  misc_difference 181: note = uracil or N1-methylpseudouracil
  misc_difference 190: note = uracil or N1-methylpseudouracil
  misc_difference 194: note = uracil or N1-methylpseudouracil
  misc_difference 200: note = uracil or N1-methylpseudouracil
  misc_difference 209: note = uracil or N1-methylpseudouracil
  misc_difference 212: note = uracil or N1-methylpseudouracil
  misc_difference 227: note = uracil or N1-methylpseudouracil
  misc_difference 232: note = uracil or N1-methylpseudouracil
  misc_difference 249: note = uracil or N1-methylpseudouracil
  misc_difference 254: note = uracil or N1-methylpseudouracil
  misc_difference 269: note = uracil or N1-methylpseudouracil
  misc_difference 271: note = uracil or N1-methylpseudouracil
  misc_difference 272: note = uracil or N1-methylpseudouracil
  misc_difference 275: note = uracil or N1-methylpseudouracil
  misc_difference 278: note = uracil or N1-methylpseudouracil
  misc_difference 292: note = uracil or N1-methylpseudouracil
  misc_difference 299: note = uracil or N1-methylpseudouracil
  misc_difference 301: note = uracil or N1-methylpseudouracil
  misc_difference 304: note = uracil or N1-methylpseudouracil
  misc_difference 305: note = uracil or N1-methylpseudouracil
  misc_difference 314: note = uracil or N1-methylpseudouracil
  misc_difference 317: note = uracil or N1-methylpseudouracil
  misc_difference 319: note = uracil or N1-methylpseudouracil
  misc_difference 326: note = uracil or N1-methylpseudouracil
  misc_difference 330: note = uracil or N1-methylpseudouracil
  misc_difference 335: note = uracil or N1-methylpseudouracil
  misc_difference 344: note = uracil or N1-methylpseudouracil
  misc_difference 346: note = uracil or N1-methylpseudouracil
  misc_difference 347: note = uracil or N1-methylpseudouracil
  misc_difference 362: note = uracil or N1-methylpseudouracil
  misc_difference 380: note = uracil or N1-methylpseudouracil
  misc_difference 383: note = uracil or N1-methylpseudouracil
  misc_difference 389: note = uracil or N1-methylpseudouracil
  misc_difference 392: note = uracil or N1-methylpseudouracil
  misc_difference 401: note = uracil or N1-methylpseudouracil
  misc_difference 410: note = uracil or N1-methylpseudouracil
  misc_difference 412: note = uracil or N1-methylpseudouracil
  misc_difference 416: note = uracil or N1-methylpseudouracil
  misc_difference 419: note = uracil or N1-methylpseudouracil
  misc_difference 422: note = uracil or N1-methylpseudouracil
  misc_difference 428: note = uracil or N1-methylpseudouracil
  misc_difference 431: note = uracil or N1-methylpseudouracil
  misc_difference 434: note = uracil or N1-methylpseudouracil
  misc_difference 442: note = uracil or N1-methylpseudouracil
  misc_difference 443: note = uracil or N1-methylpseudouracil
  misc_difference 447: note = uracil or N1-methylpseudouracil
  misc_difference 449: note = uracil or N1-methylpseudouracil
  misc_difference 452: note = uracil or N1-methylpseudouracil
  misc_difference 461: note = uracil or N1-methylpseudouracil
  misc_difference 470: note = uracil or N1-methylpseudouracil
  misc_difference 475: note = uracil or N1-methylpseudouracil
  misc_difference 476: note = uracil or N1-methylpseudouracil
  misc_difference 484: note = uracil or N1-methylpseudouracil
  misc_difference 485: note = uracil or N1-methylpseudouracil
  misc_difference 493: note = uracil or N1-methylpseudouracil
  misc_difference 497: note = uracil or N1-methylpseudouracil
  misc_difference 508: note = uracil or N1-methylpseudouracil
  misc_difference 514: note = uracil or N1-methylpseudouracil
  misc_difference 515: note = uracil or N1-methylpseudouracil
  misc_difference 520: note = uracil or N1-methylpseudouracil
  misc_difference 524: note = uracil or N1-methylpseudouracil
  misc_difference 529: note = uracil or N1-methylpseudouracil
  misc_difference 530: note = uracil or N1-methylpseudouracil
  misc_difference 536: note = uracil or N1-methylpseudouracil
  misc_difference 539: note = uracil or N1-methylpseudouracil
  misc_difference 551: note = uracil or N1-methylpseudouracil
  misc_difference 557: note = uracil or N1-methylpseudouracil
  misc_difference 560: note = uracil or N1-methylpseudouracil
  misc_difference 569: note = uracil or N1-methylpseudouracil
  misc_difference 575: note = uracil or N1-methylpseudouracil
  misc_difference 579: note = uracil or N1-methylpseudouracil
  misc_difference 580: note = uracil or N1-methylpseudouracil
  misc_difference 595: note = uracil or N1-methylpseudouracil
  misc_difference 607: note = uracil or N1-methylpseudouracil
  misc_difference 608: note = uracil or N1-methylpseudouracil
  misc_difference 629: note = uracil or N1-methylpseudouracil
  misc_difference 632: note = uracil or N1-methylpseudouracil
  misc_difference 635: note = uracil or N1-methylpseudouracil
  misc_difference 640: note = uracil or N1-methylpseudouracil
  misc_difference 659: note = uracil or N1-methylpseudouracil
  misc_difference 662: note = uracil or N1-methylpseudouracil
  misc_difference 668: note = uracil or N1-methylpseudouracil
  misc_difference 671: note = uracil or N1-methylpseudouracil
  misc_difference 679: note = uracil or N1-methylpseudouracil
  misc_difference 683: note = uracil or N1-methylpseudouracil
  misc_difference 701: note = uracil or N1-methylpseudouracil
  misc_difference 715: note = uracil or N1-methylpseudouracil
  misc_difference 716: note = uracil or N1-methylpseudouracil
  misc_difference 721: note = uracil or N1-methylpseudouracil
  misc_difference 722: note = uracil or N1-methylpseudouracil
  misc_difference 724: note = uracil or N1-methylpseudouracil
  misc_difference 734: note = uracil or N1-methylpseudouracil
  misc_difference 746: note = uracil or N1-methylpseudouracil
  misc_difference 758: note = uracil or N1-methylpseudouracil
  misc_difference 769: note = uracil or N1-methylpseudouracil
  misc_difference 770: note = uracil or N1-methylpseudouracil
  misc_difference 773: note = uracil or N1-methylpseudouracil
  misc_difference 779: note = uracil or N1-methylpseudouracil
  misc_difference 796: note = uracil or N1-methylpseudouracil
  misc_difference 818: note = uracil or N1-methylpseudouracil
  misc_difference 826: note = uracil or N1-methylpseudouracil
  misc_difference 827: note = uracil or N1-methylpseudouracil
  misc_difference 845: note = uracil or N1-methylpseudouracil
  misc_difference 848: note = uracil or N1-methylpseudouracil
  misc_difference 851: note = uracil or N1-methylpseudouracil
  misc_difference 857: note = uracil or N1-methylpseudouracil
  misc_difference 859: note = uracil or N1-methylpseudouracil
  misc_difference 860: note = uracil or N1-methylpseudouracil
  misc_difference 884: note = uracil or N1-methylpseudouracil
  misc_difference 887: note = uracil or N1-methylpseudouracil
  misc_difference 889: note = uracil or N1-methylpseudouracil
  misc_difference 908: note = uracil or N1-methylpseudouracil
  misc_difference 913: note = uracil or N1-methylpseudouracil
  misc_difference 923: note = uracil or N1-methylpseudouracil
  misc_difference 935: note = uracil or N1-methylpseudouracil
  misc_difference 938: note = uracil or N1-methylpseudouracil
  misc_difference 941: note = uracil or N1-methylpseudouracil
  misc_difference 943: note = uracil or N1-methylpseudouracil
  misc_difference 946: note = uracil or N1-methylpseudouracil
  misc_difference 947: note = uracil or N1-methylpseudouracil
  misc_difference 949: note = uracil or N1-methylpseudouracil
  misc_difference 967: note = uracil or N1-methylpseudouracil
  misc_difference 968: note = uracil or N1-methylpseudouracil
  misc_difference 974: note = uracil or N1-methylpseudouracil
  misc_difference 979: note = uracil or N1-methylpseudouracil
  misc_difference 980: note = uracil or N1-methylpseudouracil
  misc_difference 986: note = uracil or N1-methylpseudouracil
  misc_difference 989: note = uracil or N1-methylpseudouracil
  misc_difference 998: note = uracil or N1-methylpseudouracil
  misc_difference 1001: note = uracil or N1-methylpseudouracil
  misc_difference 1007: note = uracil or N1-methylpseudouracil
  misc_difference 1016: note = uracil or N1-methylpseudouracil
  misc_difference 1019: note = uracil or N1-methylpseudouracil
  misc_difference 1027: note = uracil or N1-methylpseudouracil
  misc_difference 1033: note = uracil or N1-methylpseudouracil
  misc_difference 1043: note = uracil or N1-methylpseudouracil
  misc_difference 1045: note = uracil or N1-methylpseudouracil
  misc_difference 1049: note = uracil or N1-methylpseudouracil
  misc_difference 1052: note = uracil or N1-methylpseudouracil
  misc_difference 1061: note = uracil or N1-methylpseudouracil
  misc_difference 1064: note = uracil or N1-methylpseudouracil
  misc_difference 1069: note = uracil or N1-methylpseudouracil
  misc_difference 1092: note = uracil or N1-methylpseudouracil
  misc_difference 1093: note = uracil or N1-methylpseudouracil
  misc_difference 1099: note = uracil or N1-methylpseudouracil
  misc_difference 1105: note = uracil or N1-methylpseudouracil
  misc_difference 1109: note = uracil or N1-methylpseudouracil
  misc_difference 1121: note = uracil or N1-methylpseudouracil
  misc_difference 1123: note = uracil or N1-methylpseudouracil
  misc_difference 1132: note = uracil or N1-methylpseudouracil
  misc_difference 1139: note = uracil or N1-methylpseudouracil
  misc_difference 1141: note = uracil or N1-methylpseudouracil
  misc_difference 1142: note = uracil or N1-methylpseudouracil
  misc_difference 1145: note = uracil or N1-methylpseudouracil
  misc_difference 1151: note = uracil or N1-methylpseudouracil
  misc_difference 1153: note = uracil or N1-methylpseudouracil
  misc_difference 1154: note = uracil or N1-methylpseudouracil
  misc_difference 1160: note = uracil or N1-methylpseudouracil
  misc_difference 1168: note = uracil or N1-methylpseudouracil
  misc_difference 1172: note = uracil or N1-methylpseudouracil
  misc_difference 1175: note = uracil or N1-methylpseudouracil
  misc_difference 1179: note = uracil or N1-methylpseudouracil
  misc_difference 1186: note = uracil or N1-methylpseudouracil
  misc_difference 1190: note = uracil or N1-methylpseudouracil
  misc_difference 1194: note = uracil or N1-methylpseudouracil
  misc_difference 1199: note = uracil or N1-methylpseudouracil
  misc_difference 1211: note = uracil or N1-methylpseudouracil
  misc_difference 1219: note = uracil or N1-methylpseudouracil
  misc_difference 1220: note = uracil or N1-methylpseudouracil
  misc_difference 1223: note = uracil or N1-methylpseudouracil
  misc_difference 1225: note = uracil or N1-methylpseudouracil
  misc_difference 1237: note = uracil or N1-methylpseudouracil
  misc_difference 1240: note = uracil or N1-methylpseudouracil
  misc_difference 1252: note = uracil or N1-methylpseudouracil
  misc_difference 1255: note = uracil or N1-methylpseudouracil
  misc_difference 1256: note = uracil or N1-methylpseudouracil
  misc_difference 1258: note = uracil or N1-methylpseudouracil
  misc_difference 1261: note = uracil or N1-methylpseudouracil
  misc_difference 1270: note = uracil or N1-methylpseudouracil
  misc_difference 1289: note = uracil or N1-methylpseudouracil
  misc_difference 1296: note = uracil or N1-methylpseudouracil
  misc_difference 1301: note = uracil or N1-methylpseudouracil
  misc_difference 1304: note = uracil or N1-methylpseudouracil
  misc_difference 1310: note = uracil or N1-methylpseudouracil
  misc_difference 1315: note = uracil or N1-methylpseudouracil
atgggcagcagcaagtccaagcccaaggacccttcccagagaaggaggggtggcggctctagcggctgccccttcctgggcaacaacttcggctacaccttcaagaagctgcccgtggagggcagcgaggaggacaagtcccagaccggcgtgaaccgggccagcaagggtggcctgatctacggcaactacctgcacctggagaaggtgctgaacgcccaggagctgcagtccgagaccaagggcaataagatccacgacgagcacctgttcatcatcacccaccaggcctacgagctgtggttcaagcagatcctgtgggagctggatagcgtgagggagatcttccagaacggccacgtgcgggacgagcgcaacatgctgaaggtggtgagccggatgcaccgggtgtccgtgatcctgaagctgctggtgcagcagttcagtatcctggagaccatgaccgccctggacttcaacgacttccgggagtacctgagcccagcctccgggttccagtccctgcagttcagactgctggagaacaagatcggggtgctgcagaacatgcgggtgccttacaaccggcggcactaccgggacaacttcaagggcgaggagaacgagctgctgctgaagtccgagcaggagaagaccctgctggagctggtggaggcctggctggagcggacacccgggctggagccacacgggttcaacttctggggcaagctggagaagaacatcaccagaggcctggaggaggagttcatccgcatccaggccaaggaagagtccgaggagaaggaggagcaggtggccgagttccagaagcagaaggaggtgctgctgagcctgttcgacgagaagaggcacgagcacctgctgtccaagggcgagaggcggctgagctacagagccctacagggcgccctgatgatctacttctacagggaggagccccgcttccaggtgcccttccagctgctgaccagcctgatggacatcgacagcctgatgaccaagtggcggtacaaccacgtgtgcatggtgcaccggatgctgggctccaaagccggaacgggcggcagttccggctaccactacctgcggagcaccgtgtccgaccggtacaaggtgttcgtggacctgttcaacctgagcacctacctgatccctcggcactggatccctaagatgaaccccaccatccacaagttcctgtacaccgccgagtactgcgacagcagctacttctcctccgacgagtccgacggcggaaagcccatccccaatcccctgctgggcctggactccacc

SEQ ID NO: 15 - RNA, 1320 nt, synthetic construct
  source 1..1320: mol_type = other RNA
  misc_difference 2: note = uracil or N1-methylpseudouracil
  misc_difference 7: note = uracil or N1-methylpseudouracil
  misc_difference 9: note = uracil or N1-methylpseudouracil
  misc_difference 10: note = uracil or N1-methylpseudouracil
  misc_difference 12: note = uracil or N1-methylpseudouracil
  misc_difference 16: note = uracil or N1-methylpseudouracil
  misc_difference 18: note = uracil or N1-methylpseudouracil
  misc_difference 24: note = uracil or N1-methylpseudouracil
  misc_difference 30: note = uracil or N1-methylpseudouracil
  misc_difference 33: note = uracil or N1-methylpseudouracil
  misc_difference 34: note = uracil or N1-methylpseudouracil
  misc_difference 36: note = uracil or N1-methylpseudouracil
  misc_difference 58: note = uracil or N1-methylpseudouracil
  misc_difference 60: note = uracil or N1-methylpseudouracil
  misc_difference 61: note = uracil or N1-methylpseudouracil
  misc_difference 63: note = uracil or N1-methylpseudouracil
  misc_difference 67: note = uracil or N1-methylpseudouracil
  misc_difference 69: note = uracil or N1-methylpseudouracil
  misc_difference 72: note = uracil or N1-methylpseudouracil
  misc_difference 73: note = uracil or N1-methylpseudouracil
  misc_difference 74: note = uracil or N1-methylpseudouracil
  misc_difference 75: note = uracil or N1-methylpseudouracil
  misc_difference 77: note = uracil or N1-methylpseudouracil
  misc_difference 78: note = uracil or N1-methylpseudouracil
  misc_difference 84: note = uracil or N1-methylpseudouracil
  misc_difference 87: note = uracil or N1-methylpseudouracil
  misc_difference 88: note = uracil or N1-methylpseudouracil
  misc_difference 89: note = uracil or N1-methylpseudouracil
  misc_difference 90: note = uracil or N1-methylpseudouracil
  misc_difference 94: note = uracil or N1-methylpseudouracil
  misc_difference 96: note = uracil or N1-methylpseudouracil
  misc_difference 100: note = uracil or N1-methylpseudouracil
  misc_difference 101: note = uracil or N1-methylpseudouracil
  misc_difference 102: note = uracil or N1-methylpseudouracil
  misc_difference 110: note = uracil or N1-methylpseudouracil
  misc_difference 111: note = uracil or N1-methylpseudouracil
  misc_difference 114: note = uracil or N1-methylpseudouracil
  misc_difference 116: note = uracil or N1-methylpseudouracil
  misc_difference 117: note = uracil or N1-methylpseudouracil
  misc_difference 124: note = uracil or N1-methylpseudouracil
  misc_difference 126: note = uracil or N1-methylpseudouracil
  misc_difference 139: note = uracil or N1-methylpseudouracil
  misc_difference 152: note = uracil or N1-methylpseudouracil
  misc_difference 171: note = uracil or N1-methylpseudouracil
  misc_difference 176: note = uracil or N1-methylpseudouracil
  misc_difference 179: note = uracil or N1-methylpseudouracil
  misc_difference 181: note = uracil or N1-methylpseudouracil
  misc_difference 190: note = uracil or N1-methylpseudouracil
  misc_difference 194: note = uracil or N1-methylpseudouracil
  misc_difference 200: note = uracil or N1-methylpseudouracil
  misc_difference 209: note = uracil or N1-methylpseudouracil
  misc_difference 212: note = uracil or N1-methylpseudouracil
  misc_difference 227: note = uracil or N1-methylpseudouracil
  misc_difference 232: note = uracil or N1-methylpseudouracil
  misc_difference 249: note = uracil or N1-methylpseudouracil
  misc_difference 254: note = uracil or N1-methylpseudouracil
  misc_difference 269: note = uracil or N1-methylpseudouracil
  misc_difference 271: note = uracil or N1-methylpseudouracil
  misc_difference 272: note = uracil or N1-methylpseudouracil
  misc_difference 275: note = uracil or N1-methylpseudouracil
  misc_difference 278: note = uracil or N1-methylpseudouracil
  misc_difference 292: note = uracil or N1-methylpseudouracil
  misc_difference 299: note = uracil or N1-methylpseudouracil
  misc_difference 301: note = uracil or N1-methylpseudouracil
  misc_difference 304: note = uracil or N1-methylpseudouracil
  misc_difference 305: note = uracil or N1-methylpseudouracil
  misc_difference 314: note = uracil or N1-methylpseudouracil
  misc_difference 317: note = uracil or N1-methylpseudouracil
  misc_difference 319: note = uracil or N1-methylpseudouracil
  misc_difference 326: note = uracil or N1-methylpseudouracil
  misc_difference 330: note = uracil or N1-methylpseudouracil
  misc_difference 335: note = uracil or N1-methylpseudouracil
  misc_difference 344: note = uracil or N1-methylpseudouracil
  misc_difference 346: note = uracil or N1-methylpseudouracil
  misc_difference 347: note = uracil or N1-methylpseudouracil
  misc_difference 362: note = uracil or N1-methylpseudouracil
  misc_difference 380: note = uracil or N1-methylpseudouracil
  misc_difference 383: note = uracil or N1-methylpseudouracil
  misc_difference 389: note = uracil or N1-methylpseudouracil
  misc_difference 392: note = uracil or N1-methylpseudouracil
  misc_difference 401: note = uracil or N1-methylpseudouracil
  misc_difference 410: note = uracil or N1-methylpseudouracil
  misc_difference 412: note = uracil or N1-methylpseudouracil
  misc_difference 416: note = uracil or N1-methylpseudouracil
  misc_difference 419: note = uracil or N1-methylpseudouracil
  misc_difference 422: note = uracil or N1-methylpseudouracil
  misc_difference 428: note = uracil or N1-methylpseudouracil
  misc_difference 431: note = uracil or N1-methylpseudouracil
  misc_difference 434: note = uracil or N1-methylpseudouracil
  misc_difference 442: note = uracil or N1-methylpseudouracil
  misc_difference 443: note = uracil or N1-methylpseudouracil
  misc_difference 447: note = uracil or N1-methylpseudouracil
  misc_difference 449: note = uracil or N1-methylpseudouracil
  misc_difference 452: note = uracil or N1-methylpseudouracil
  misc_difference 461: note = uracil or N1-methylpseudouracil
  misc_difference 470: note = uracil or N1-methylpseudouracil
  misc_difference 475: note = uracil or N1-methylpseudouracil
  misc_difference 476: note = uracil or N1-methylpseudouracil
  misc_difference 484: note = uracil or N1-methylpseudouracil
  misc_difference 485: note = uracil or N1-methylpseudouracil
  misc_difference 493: note = uracil or N1-methylpseudouracil
  misc_difference 497: note = uracil or N1-methylpseudouracil
  misc_difference 508: note = uracil or N1-methylpseudouracil
  misc_difference 514: note = uracil or N1-methylpseudouracil
  misc_difference 515: note = uracil or N1-methylpseudouracil
  misc_difference 520: note = uracil or N1-methylpseudouracil
  misc_difference 524: note = uracil or N1-methylpseudouracil
  misc_difference 529: note = uracil or N1-methylpseudouracil
  misc_difference 530: note = uracil or N1-methylpseudouracil
  misc_difference 536: note = uracil or N1-methylpseudouracil
  misc_difference 539: note = uracil or N1-methylpseudouracil
  misc_difference 551: note = uracil or N1-methylpseudouracil
  misc_difference 557: note = uracil or N1-methylpseudouracil
  misc_difference 560: note = uracil or N1-methylpseudouracil
  misc_difference 569: note = uracil or N1-methylpseudouracil
  misc_difference 575: note = uracil or N1-methylpseudouracil
  misc_difference 579: note = uracil or N1-methylpseudouracil
  misc_difference 580: note = uracil or N1-methylpseudouracil
  misc_difference 595: note = uracil or N1-methylpseudouracil
  misc_difference 607: note = uracil or N1-methylpseudouracil
  misc_difference 608: note = uracil or N1-methylpseudouracil
  misc_difference 629: note = uracil or N1-methylpseudouracil
  misc_difference 632: note = uracil or N1-methylpseudouracil
  misc_difference 635: note = uracil or N1-methylpseudouracil
  misc_difference 640: note = uracil or N1-methylpseudouracil
  misc_difference 659: note = uracil or N1-methylpseudouracil
  misc_difference 662: note = uracil or N1-methylpseudouracil
  misc_difference 668: note = uracil or N1-methylpseudouracil
  misc_difference 671: note = uracil or N1-methylpseudouracil
  misc_difference 679: note = uracil or N1-methylpseudouracil
  misc_difference 683: note = uracil or N1-methylpseudouracil
  misc_difference 701: note = uracil or N1-methylpseudouracil
  misc_difference 715: note = uracil or N1-methylpseudouracil
  misc_difference 716: note = uracil or N1-methylpseudouracil
  misc_difference 721: note = uracil or N1-methylpseudouracil
  misc_difference 722: note = uracil or N1-methylpseudouracil
  misc_difference 724: note = uracil or N1-methylpseudouracil
  misc_difference 734: note = uracil or N1-methylpseudouracil
  misc_difference 746: note = uracil or N1-methylpseudouracil
  misc_difference 758: note = uracil or N1-methylpseudouracil
  misc_difference 769: note = uracil or N1-methylpseudouracil
  misc_difference 770: note = uracil or N1-methylpseudouracil
  misc_difference 773: note = uracil or N1-methylpseudouracil
  misc_difference 779: note = uracil or N1-methylpseudouracil
  misc_difference 796: note = uracil or N1-methylpseudouracil
  misc_difference 818: note = uracil or N1-methylpseudouracil
  misc_difference 826: note = uracil or N1-methylpseudouracil
  misc_difference 827: note = uracil or N1-methylpseudouracil
  misc_difference 845: note = uracil or N1-methylpseudouracil
  misc_difference 848: note = uracil or N1-methylpseudouracil
  misc_difference 851: note = uracil or N1-methylpseudouracil
  misc_difference 857: note = uracil or N1-methylpseudouracil
  misc_difference 859: note = uracil or N1-methylpseudouracil
  misc_difference 860: note = uracil or N1-methylpseudouracil
  misc_difference 884: note = uracil or N1-methylpseudouracil
  misc_difference 887: note = uracil or N1-methylpseudouracil
  misc_difference 889: note = uracil or N1-methylpseudouracil
  misc_difference 908: note = uracil or N1-methylpseudouracil
  misc_difference 913: note = uracil or N1-methylpseudouracil
  misc_difference 923: note = uracil or N1-methylpseudouracil
  misc_difference 935: note = uracil or N1-methylpseudouracil
  misc_difference 938: note = uracil or N1-methylpseudouracil
  misc_difference 941: note = uracil or N1-methylpseudouracil
  misc_difference 943: note = uracil or N1-methylpseudouracil
  misc_difference 946: note = uracil or N1-methylpseudouracil
  misc_difference 947: note = uracil or N1-methylpseudouracil
  misc_difference 949: note = uracil or N1-methylpseudouracil
  misc_difference 967: note = uracil or N1-methylpseudouracil
  misc_difference 968: note = uracil or N1-methylpseudouracil
  misc_difference 974: note = uracil or N1-methylpseudouracil
  misc_difference 979: note = uracil or N1-methylpseudouracil
  misc_difference 980: note = uracil or N1-methylpseudouracil
  misc_difference 986: note = uracil or N1-methylpseudouracil
  misc_difference 989: note = uracil or N1-methylpseudouracil
  misc_difference 998: note = uracil or N1-methylpseudouracil
  misc_difference 1001: note = uracil or N1-methylpseudouracil
  misc_difference 1007: note = uracil or N1-methylpseudouracil
  misc_difference 1016: note = uracil or N1-methylpseudouracil
  misc_difference 1019: note = uracil or N1-methylpseudouracil
  misc_difference 1027: note = uracil or N1-methylpseudouracil
  misc_difference 1033: note = uracil or N1-methylpseudouracil
  misc_difference 1043: note = uracil or N1-methylpseudouracil
  misc_difference 1045: note = uracil or N1-methylpseudouracil
  misc_difference 1049: note = uracil or N1-methylpseudouracil
  misc_difference 1052: note = uracil or N1-methylpseudouracil
  misc_difference 1061: note = uracil or N1-methylpseudouracil
  misc_difference 1064: note = uracil or N1-methylpseudouracil
  misc_difference 1069: note = uracil or N1-methylpseudouracil
  misc_difference 1092: note = uracil or N1-methylpseudouracil
  misc_difference 1093: note = uracil or N1-methylpseudouracil
  misc_difference 1099: note = uracil or N1-methylpseudouracil
  misc_difference 1105: note = uracil or N1-methylpseudouracil
  misc_difference 1109: note = uracil or N1-methylpseudouracil
  misc_difference 1121: note = uracil or N1-methylpseudouracil
  misc_difference 1123: note = uracil or N1-methylpseudouracil
  misc_difference 1132: note = uracil or N1-methylpseudouracil
  misc_difference 1139: note = uracil or N1-methylpseudouracil
  misc_difference 1141: note = uracil or N1-methylpseudouracil
  misc_difference 1142: note = uracil or N1-methylpseudouracil
  misc_difference 1145: note = uracil or N1-methylpseudouracil
  misc_difference 1151: note = uracil or N1-methylpseudouracil
  misc_difference 1153: note = uracil or N1-methylpseudouracil
  misc_difference 1154: note = uracil or N1-methylpseudouracil
  misc_difference 1160: note = uracil or N1-methylpseudouracil
  misc_difference 1168: note = uracil or N1-methylpseudouracil
  misc_difference 1172: note = uracil or N1-methylpseudouracil
  misc_difference 1175: note = uracil or N1-methylpseudouracil
  misc_difference 1179: note = uracil or N1-methylpseudouracil
  misc_difference 1186: note = uracil or N1-methylpseudouracil
  misc_difference 1190: note = uracil or N1-methylpseudouracil
  misc_difference 1194: note = uracil or N1-methylpseudouracil
  misc_difference 1199: note = uracil or N1-methylpseudouracil
  misc_difference 1211: note = uracil or N1-methylpseudouracil
  misc_difference 1219: note = uracil or N1-methylpseudouracil
  misc_difference 1220: note = uracil or N1-methylpseudouracil
  misc_difference 1223: note = uracil or N1-methylpseudouracil
  misc_difference 1225: note = uracil or N1-methylpseudouracil
  misc_difference 1237: note = uracil or N1-methylpseudouracil
  misc_difference 1240: note = uracil or N1-methylpseudouracil
  misc_difference 1252: note = uracil or N1-methylpseudouracil
  misc_difference 1255: note = uracil or N1-methylpseudouracil
  misc_difference 1256: note = uracil or N1-methylpseudouracil
  misc_difference 1258: note = uracil or N1-methylpseudouracil
  misc_difference 1261: note = uracil or N1-methylpseudouracil
  misc_difference 1270: note = uracil or N1-methylpseudouracil
  misc_difference 1289: note = uracil or N1-methylpseudouracil
  misc_difference 1296: note = uracil or N1-methylpseudouracil
  misc_difference 1301: note = uracil or N1-methylpseudouracil
  misc_difference 1304: note = uracil or N1-methylpseudouracil
  misc_difference 1310: note = uracil or N1-methylpseudouracil
  misc_difference 1315: note = uracil or N1-methylpseudouracil
atgggatcttctaaatctaaacctaaagatccttctcaaagaagaagaggaggaggatcttctggatgtccttttcttggaaataattttggatatacatttaagaaacttcctgttgaaggatctgaagaagacaagtcccagaccggcgtgaaccgggccagcaagggtggcctgatctacggcaactacctgcacctggagaaggtgctgaacgcccaggagctgcagtccgagaccaagggcaataagatccacgacgagcacctgttcatcatcacccaccaggcctacgagctgtggttcaagcagatcctgtgggagctggatagcgtgagggagatcttccagaacggccacgtgcgggacgagcgcaacatgctgaaggtggtgagccggatgcaccgggtgtccgtgatcctgaagctgctggtgcagcagttcagtatcctggagaccatgaccgccctggacttcaacgacttccgggagtacctgagcccagcctccgggttccagtccctgcagttcagactgctggagaacaagatcggggtgctgcagaacatgcgggtgccttacaaccggcggcactaccgggacaacttcaagggcgaggagaacgagctgctgctgaagtccgagcaggagaagaccctgctggagctggtggaggcctggctggagcggacacccgggctggagccacacgggttcaacttctggggcaagctggagaagaacatcaccagaggcctggaggaggagttcatccgcatccaggccaaggaagagtccgaggagaaggaggagcaggtggccgagttccagaagcagaaggaggtgctgctgagcctgttcgacgagaagaggcacgagcacctgctgtccaagggcgagaggcggctgagctacagagccctacagggcgccctgatgatctacttctacagggaggagccccgcttccaggtgcccttccagctgctgaccagcctgatggacatcgacagcctgatgaccaagtggcggtacaaccacgtgtgcatggtgcaccggatgctgggctccaaagccggaacgggcggcagttccggctaccactacctgcggagcaccgtgtccgaccggtacaaggtgttcgtggacctgttcaacctgagcacctacctgatccctcggcactggatccctaagatgaaccccaccatccacaagttcctgtacaccgccgagtactgcgacagcagctacttctcctccgacgagtccgacggcggaaagcccatccccaatcccctgctgggcctggactccacc

SEQ ID NO: 16 - protein, 434 aa, synthetic construct
MAHAMENSWTISKEYHIDEEVGFALPNPQENLPDFYNDWMFIAKHLPDLIESGQLRERVEKLNMLSIDHLTDHKSQRLARLVLGCITMAYVWGKGHGDVRKVLPRNIAVPYCQLSKKLELPPILVYADCVLANWKKKDPNKPLTYENMDVLFSFRDGDCSKGFFLVSLLVEIAAASAIKVIPTVFKAMQMQERDTLLKALLEIASCLEKALQVFHQIHDHVNPKAFFSVLRIYLSGWKGNPQLSDGLVYEGFWEDPKEFAGGSAGQSSVFQCFDVLLGIQQTAGGGHAAQFLQDMRRYMPPAHRNFLCSLESNPSVREFVLSKGDAGLREAYDACVKALVSLRSYHLQIVTKYILIPASQQPKENKTSEDPSKLEAKGTGGTDLMNFLKTVRSTTEKSLLKEGGGGGSGGGGSYRLKKISKEEKTPGCVKIKKC

SEQ ID NO: 17 - RNA, 1302 nt, synthetic construct
  source 1..1302: mol_type = other RNA
  misc_difference 2: note = uracil or N1-methylpseudouracil
  misc_difference 14: note = uracil or N1-methylpseudouracil
  misc_difference 25: note = uracil or N1-methylpseudouracil
  misc_difference 32: note = uracil or N1-methylpseudouracil
  misc_difference 43: note = uracil or N1-methylpseudouracil
  misc_difference 50: note = uracil or N1-methylpseudouracil
  misc_difference 62: note = uracil or N1-methylpseudouracil
  misc_difference 67: note = uracil or N1-methylpseudouracil
  misc_difference 68: note = uracil or N1-methylpseudouracil
  misc_difference 74: note = uracil or N1-methylpseudouracil
  misc_difference 78: note = uracil or N1-methylpseudouracil
  misc_difference 84: note = uracil or N1-methylpseudouracil
  misc_difference 95: note = uracil or N1-methylpseudouracil
  misc_difference 99: note = uracil or N1-methylpseudouracil
  misc_difference 103: note = uracil or N1-methylpseudouracil
  misc_difference 104: note = uracil or N1-methylpseudouracil
  misc_difference 106: note = uracil or N1-methylpseudouracil
  misc_difference 115: note = uracil or N1-methylpseudouracil
  misc_difference 119: note = uracil or N1-methylpseudouracil
  misc_difference 121: note = uracil or N1-methylpseudouracil
  misc_difference 122: note = uracil or N1-methylpseudouracil
  misc_difference 125: note = uracil or N1-methylpseudouracil
  misc_difference 135: note = uracil or N1-methylpseudouracil
  misc_difference 137: note = uracil or N1-methylpseudouracil
  misc_difference 146: note = uracil or N1-methylpseudouracil
  misc_difference 149: note = uracil or N1-methylpseudouracil
  misc_difference 164: note = uracil or N1-methylpseudouracil
  misc_difference 176: note = uracil or N1-methylpseudouracil
  misc_difference 185: note = uracil or N1-methylpseudouracil
  misc_difference 191: note = uracil or N1-methylpseudouracil
  misc_difference 194: note = uracil or N1-methylpseudouracil
  misc_difference 200: note = uracil or N1-methylpseudouracil
  misc_difference 209: note = uracil or N1-methylpseudouracil
  misc_difference 233: note = uracil or N1-methylpseudouracil
  misc_difference 242: note = uracil or N1-methylpseudouracil
  misc_difference 245: note = uracil or N1-methylpseudouracil
  misc_difference 248: note = uracil or N1-methylpseudouracil
  misc_difference 253: note = uracil or N1-methylpseudouracil
  misc_difference 257: note = uracil or N1-methylpseudouracil
  misc_difference 263: note = uracil or N1-methylpseudouracil
  misc_difference 268: note = uracil or N1-methylpseudouracil
  misc_difference 272: note = uracil or N1-methylpseudouracil
  misc_difference 274: note = uracil or N1-methylpseudouracil
  misc_difference 296: note = uracil or N1-methylpseudouracil
  misc_difference 305: note = uracil or N1-methylpseudouracil
  misc_difference 308: note = uracil or N1-methylpseudouracil
  misc_difference 312: note = uracil or N1-methylpseudouracil
  misc_difference 320: note = uracil or N1-methylpseudouracil
  misc_difference 326: note = uracil or N1-methylpseudouracil
  misc_difference 330: note = uracil or N1-methylpseudouracil
  misc_difference 331: note = uracil or N1-methylpseudouracil
  misc_difference 334: note = uracil or N1-methylpseudouracil
  misc_difference 341: note = uracil or N1-methylpseudouracil
  misc_difference 353: note = uracil or N1-methylpseudouracil
  misc_difference 359: note = uracil or N1-methylpseudouracil
  misc_difference 363: note = uracil or N1-methylpseudouracil
  misc_difference 366: note = uracil or N1-methylpseudouracil
  misc_difference 368: note = uracil or N1-methylpseudouracil
  misc_difference 371: note = uracil or N1-methylpseudouracil
  misc_difference 374: note = uracil or N1-methylpseudouracil
  misc_difference 376: note = uracil or N1-methylpseudouracil
  misc_difference 385: note = uracil or N1-methylpseudouracil
  misc_difference 389: note = uracil or N1-methylpseudouracil
  misc_difference 392: note = uracil or N1-methylpseudouracil
  misc_difference 400: note = uracil or N1-methylpseudouracil
  misc_difference 417: note = uracil or N1-methylpseudouracil
  misc_difference 426: note = uracil or N1-methylpseudouracil
  misc_difference 428: note = uracil or N1-methylpseudouracil
  misc_difference 433: note = uracil or N1-methylpseudouracil
  misc_difference 443: note = uracil or N1-methylpseudouracil
  misc_difference 449: note = uracil or N1-methylpseudouracil
  misc_difference 452: note = uracil or N1-methylpseudouracil
  misc_difference 454: note = uracil or N1-methylpseudouracil
  misc_difference 455: note = uracil or N1-methylpseudouracil
  misc_difference 460: note = uracil or N1-methylpseudouracil
  misc_difference 461: note = uracil or N1-methylpseudouracil
  misc_difference 475: note = uracil or N1-methylpseudouracil
  misc_difference 487: note = uracil or N1-methylpseudouracil
  misc_difference 488: note = uracil or N1-methylpseudouracil
  misc_difference 490: note = uracil or N1-methylpseudouracil
  misc_difference 491: note = uracil or N1-methylpseudouracil
  misc_difference 494: note = uracil or N1-methylpseudouracil
  misc_difference 497: note = uracil or N1-methylpseudouracil
  misc_difference 503: note = uracil or N1-methylpseudouracil
  misc_difference 506: note = uracil or N1-methylpseudouracil
  misc_difference 509: note = uracil or N1-methylpseudouracil
  misc_difference 515: note = uracil or N1-methylpseudouracil
  misc_difference 533: note = uracil or N1-methylpseudouracil
  misc_difference 539: note = uracil or N1-methylpseudouracil
  misc_difference 542: note = uracil or N1-methylpseudouracil
  misc_difference 546: note = uracil or N1-methylpseudouracil
  misc_difference 551: note = uracil or N1-methylpseudouracil
  misc_difference 553: note = uracil or N1-methylpseudouracil
  misc_difference 554: note = uracil or N1-methylpseudouracil
  misc_difference 563: note = uracil or N1-methylpseudouracil
  misc_difference 569: note = uracil or N1-methylpseudouracil
  misc_difference 587: note = uracil or N1-methylpseudouracil
  misc_difference 590: note = uracil or N1-methylpseudouracil
  misc_difference 599: note = uracil or N1-methylpseudouracil
  misc_difference 601: note = uracil or N1-methylpseudouracil
  misc_difference 602: note = uracil or N1-methylpseudouracil
  misc_difference 608: note = uracil or N1-methylpseudouracil
  misc_difference 616: note = uracil or N1-methylpseudouracil
  misc_difference 620: note = uracil or N1-methylpseudouracil
  misc_difference 632: note = uracil or N1-methylpseudouracil
  misc_difference 638: note = uracil or N1-methylpseudouracil
  misc_difference 640: note = uracil or N1-methylpseudouracil
  misc_difference 641: note = uracil or N1-methylpseudouracil
  misc_difference 650: note = uracil or N1-methylpseudouracil
  misc_difference 662: note = uracil or N1-methylpseudouracil
  misc_difference 669: note = uracil or N1-methylpseudouracil
  misc_difference 676: note = uracil or N1-methylpseudouracil
  misc_difference 677: note = uracil or N1-methylpseudouracil
  misc_difference 679: note = uracil or N1-methylpseudouracil
  misc_difference 680: note = uracil or N1-methylpseudouracil
  misc_difference 686: note = uracil or N1-methylpseudouracil
  misc_difference 689: note = uracil or N1-methylpseudouracil
  misc_difference 695: note = uracil or N1-methylpseudouracil
  misc_difference 697: note = uracil or N1-methylpseudouracil
  misc_difference 701: note = uracil or N1-methylpseudouracil
  misc_difference 709: note = uracil or N1-methylpseudouracil
  misc_difference 723: note = uracil or N1-methylpseudouracil
  misc_difference 728: note = uracil or N1-methylpseudouracil
  misc_difference 740: note = uracil or N1-methylpseudouracil
  misc_difference 743: note = uracil or N1-methylpseudouracil
  misc_difference 745: note = uracil or N1-methylpseudouracil
  misc_difference 754: note = uracil or N1-methylpseudouracil
  misc_difference 755: note = uracil or N1-methylpseudouracil
  misc_difference 757: note = uracil or N1-methylpseudouracil
  misc_difference 768: note = uracil or N1-methylpseudouracil
  misc_difference 775: note = uracil or N1-methylpseudouracil
  misc_difference 776: note = uracil or N1-methylpseudouracil
  misc_difference 780: note = uracil or N1-methylpseudouracil
  misc_difference 787: note = uracil or N1-methylpseudouracil
  misc_difference 806: note = uracil or N1-methylpseudouracil
  misc_difference 808: note = uracil or N1-methylpseudouracil
  misc_difference 809: note = uracil or N1-methylpseudouracil
  misc_difference 814: note = uracil or N1-methylpseudouracil
  misc_difference 817: note = uracil or N1-methylpseudouracil
  misc_difference 818: note = uracil or N1-methylpseudouracil
  misc_difference 824: note = uracil or N1-methylpseudouracil
  misc_difference 827: note = uracil or N1-methylpseudouracil
  misc_difference 830: note = uracil or N1-methylpseudouracil
  misc_difference 836: note = uracil or N1-methylpseudouracil
  misc_difference 849: note = uracil or N1-methylpseudouracil
  misc_difference 852: note = uracil or N1-methylpseudouracil
  misc_difference 867: note = uracil or N1-methylpseudouracil
  misc_difference 871: note = uracil or N1-methylpseudouracil
  misc_difference 872: note = uracil or N1-methylpseudouracil
  misc_difference 875: note = uracil or N1-methylpseudouracil
  misc_difference 884: note = uracil or N1-methylpseudouracil
  misc_difference 892: note = uracil or N1-methylpseudouracil
  misc_difference 896: note = uracil or N1-methylpseudouracil
  misc_difference 900: note = uracil or N1-methylpseudouracil
  misc_difference 903: note = uracil or N1-methylpseudouracil
  misc_difference 916: note = uracil or N1-methylpseudouracil
  misc_difference 917: note = uracil or N1-methylpseudouracil
  misc_difference 920: note = uracil or N1-methylpseudouracil
  misc_difference 922: note = uracil or N1-methylpseudouracil
  misc_difference 929: note = uracil or N1-methylpseudouracil
  misc_difference 942: note = uracil or N1-methylpseudouracil
  misc_difference 947: note = uracil or N1-methylpseudouracil
  misc_difference 955: note = uracil or N1-methylpseudouracil
  misc_difference 956: note = uracil or N1-methylpseudouracil
  misc_difference 959: note = uracil or N1-methylpseudouracil
  misc_difference 962: note = uracil or N1-methylpseudouracil
  misc_difference 983: note = uracil or N1-methylpseudouracil
  misc_difference 994: note = uracil or N1-methylpseudouracil
  misc_difference 1003: note = uracil or N1-methylpseudouracil
  misc_difference 1007: note = uracil or N1-methylpseudouracil
  misc_difference 1008: note = uracil or N1-methylpseudouracil
  misc_difference 1014: note = uracil or N1-methylpseudouracil
  misc_difference 1015: note = uracil or N1-methylpseudouracil
  misc_difference 1016: note = uracil or N1-methylpseudouracil
  misc_difference 1019: note = uracil or N1-methylpseudouracil
  misc_difference 1021: note = uracil or N1-methylpseudouracil
  misc_difference 1025: note = uracil or N1-methylpseudouracil
  misc_difference 1033: note = uracil or N1-methylpseudouracil
  misc_difference 1040: note = uracil or N1-methylpseudouracil
  misc_difference 1046: note = uracil or N1-methylpseudouracil
  misc_difference 1049: note = uracil or N1-methylpseudouracil
  misc_difference 1057: note = uracil or N1-methylpseudouracil
  misc_difference 1061: note = uracil or N1-methylpseudouracil
  misc_difference 1064: note = uracil or N1-methylpseudouracil
  misc_difference 1067: note = uracil or N1-methylpseudouracil
  misc_difference 1071: note = uracil or N1-methylpseudouracil
  misc_difference 1086: note = uracil or N1-methylpseudouracil
  misc_difference 1113: note = uracil or N1-methylpseudouracil
  misc_difference 1121: note = uracil or N1-methylpseudouracil
  misc_difference 1151: note = uracil or N1-methylpseudouracil
  misc_difference 1154: note = uracil or N1-methylpseudouracil
  misc_difference 1159: note = uracil or N1-methylpseudouracil
  misc_difference 1160: note = uracil or N1-methylpseudouracil
  misc_difference 1163: note = uracil or N1-methylpseudouracil
  misc_difference 1172: note = uracil or N1-methylpseudouracil
  misc_difference 1194: note = uracil or N1-methylpseudouracil
  misc_difference 1196: note = uracil or N1-methylpseudouracil
  misc_difference 1199: note = uracil or N1-methylpseudouracil
  misc_difference 1212: note = uracil or N1-methylpseudouracil
  misc_difference 1222: note = uracil or N1-methylpseudouracil
  misc_difference 1224: note = uracil or N1-methylpseudouracil
  misc_difference 1227: note = uracil or N1-methylpseudouracil
  misc_difference 1240: note = uracil or N1-methylpseudouracil
  misc_difference 1247: note = uracil or N1-methylpseudouracil
  misc_difference 1256: note = uracil or N1-methylpseudouracil
  misc_difference 1258: note = uracil or N1-methylpseudouracil
  misc_difference 1278: note = uracil or N1-methylpseudouracil
  misc_difference 1282: note = uracil or N1-methylpseudouracil
  misc_difference 1286: note = uracil or N1-methylpseudouracil
  misc_difference 1292: note = uracil or N1-methylpseudouracil
  misc_difference 1300: note = uracil or N1-methylpseudouracil
atggcccacgccatggagaacagctggaccatcagcaaggagtaccacatcgacgaggaggtgggcttcgccctgcctaaccctcaggagaacctgcctgacttctacaacgactggatgttcatcgccaagcatctgccggacctgatcgagagcggccagctgagagagagagtggagaagctgaacatgctgagcatcgaccacctgaccgaccacaagagccagagactggccagactggtgctgggctgcatcaccatggcctacgtgtggggcaagggccacggcgacgtgagaaaggtgctgcctagaaacatcgccgtgccttactgccagctgagcaagaagctggagctgcctcctatcctggtgtacgccgactgcgtgctggccaactggaagaagaaggaccctaacaagcctctgacctacgagaacatggacgtgctgttcagcttcagagacggcgactgcagcaagggcttcttcctggtgagcctgctggtggagatcgccgccgccagcgccatcaaggtgatccctaccgtgttcaaggccatgcagatgcaggagagagacaccctgctgaaggccctgttggaaatcgccagctgcctggagaaggcgctgcaggtgttccaccagatccacgaccacgtgaaccctaaggccttcttcagcgtgctgagaatctacctgagcggctggaagggcaaccctcagctgagcgacggactggtatacgagggcttctgggaggaccctaaggagttcgctggaggctccgcgggacagagcagcgtgttccagtgcttcgacgtgctgctgggcatccagcagaccgctggtggcggacacgcagctcagttcctgcaggacatgagaagatacatgcctcctgcccacagaaacttcctgtgcagcctggagagcaaccctagcgtgagagagttcgtgctgagcaagggcgacgccggcctgagagaggcctacgacgcctgcgttaaggctttggtgtcactgagaagctaccacctgcagatcgtgaccaagtacatcctgatccctgccagccagcagcctaaggagaacaagaccagcgaggaccctagcaagctggaggccaagggcaccggcggcaccgacctgatgaacttcctgaagaccgtgagaagcaccaccgagaagagtctgctgaaggagggcggtggaggcggatctggtggaggaggcagctacagactgaagaagatctccaaggaggagaagacccctggctgcgtgaagatcaagaagtgc

SEQ ID NO: 18 - protein, 422 aa, synthetic construct; identical to SEQ ID NO: 4

SEQ ID NO: 19 - RNA, 1266 nt, synthetic construct
  source 1..1266: mol_type = other RNA
  misc_difference 2: note = uracil or N1-methylpseudouracil
  misc_difference 24: note = uracil or N1-methylpseudouracil
  misc_difference 33: note = uracil or N1-methylpseudouracil
  misc_difference 58: note = uracil or N1-methylpseudouracil
  misc_difference 71: note = uracil or N1-methylpseudouracil
  misc_difference 82: note = uracil or N1-methylpseudouracil
  misc_difference 89: note = uracil or N1-methylpseudouracil
  misc_difference 100: note = uracil or N1-methylpseudouracil
  misc_difference 107: note = uracil or N1-methylpseudouracil
  misc_difference 119: note = uracil or N1-methylpseudouracil
  misc_difference 124: note = uracil or N1-methylpseudouracil
  misc_difference 125: note = uracil or N1-methylpseudouracil
  misc_difference 131: note = uracil or N1-methylpseudouracil
  misc_difference 135: note = uracil or N1-methylpseudouracil
  misc_difference 141: note = uracil or N1-methylpseudouracil
  misc_difference 152: note = uracil or N1-methylpseudouracil
  misc_difference 156: note = uracil or N1-methylpseudouracil
  misc_difference 160: note = uracil or N1-methylpseudouracil
  misc_difference 161: note = uracil or N1-methylpseudouracil
  misc_difference 163: note = uracil or N1-methylpseudouracil
  misc_difference 172: note = uracil or N1-methylpseudouracil
  misc_difference 176: note = uracil or N1-methylpseudouracil
  misc_difference 178: note = uracil or N1-methylpseudouracil
  misc_difference 179: note = uracil or N1-methylpseudouracil
  misc_difference 182: note = uracil or N1-methylpseudouracil
  misc_difference 193: note = uracil or N1-methylpseudouracil
  misc_difference 194: note = uracil or N1-methylpseudouracil
  misc_difference 203: note = uracil or N1-methylpseudouracil
  misc_difference 206: note = uracil or N1-methylpseudouracil
  misc_difference 221: note = uracil or N1-methylpseudouracil
  misc_difference 233: note = uracil or N1-methylpseudouracil
  misc_difference 242: note = uracil or N1-methylpseudouracil
  misc_difference 248: note = uracil or N1-methylpseudouracil
  misc_difference 251: note = uracil or N1-methylpseudouracil
  misc_difference 257: note = uracil or N1-methylpseudouracil
  misc_difference 266: note = uracil or N1-methylpseudouracil
  misc_difference 290: note = uracil or N1-methylpseudouracil
  misc_difference 299: note = uracil or N1-methylpseudouracil
  misc_difference 302: note = uracil or N1-methylpseudouracil
  misc_difference 305: note = uracil or N1-methylpseudouracil
  misc_difference 310: note = uracil or N1-methylpseudouracil
  misc_difference 314: note = uracil or N1-methylpseudouracil
  misc_difference 320: note = uracil or N1-methylpseudouracil
  misc_difference 325: note = uracil or N1-methylpseudouracil
  misc_difference 329: note = uracil or N1-methylpseudouracil
  misc_difference 331: note = uracil or N1-methylpseudouracil
  misc_difference 353: note = uracil or N1-methylpseudouracil
  misc_difference 362: note = uracil or N1-methylpseudouracil
  misc_difference 365: note = uracil or N1-methylpseudouracil
  misc_difference 369: note = uracil or N1-methylpseudouracil
  misc_difference 377: note = uracil or N1-methylpseudouracil
  misc_difference 383: note = uracil or N1-methylpseudouracil
  misc_difference 387: note = uracil or N1-methylpseudouracil
  misc_difference 388: note = uracil or N1-methylpseudouracil
  misc_difference 391: note = uracil or N1-methylpseudouracil
  misc_difference 398: note = uracil or N1-methylpseudouracil
  misc_difference 410: note = uracil or N1-methylpseudouracil
  misc_difference 416: note = uracil or N1-methylpseudouracil
  misc_difference 420: note = uracil or N1-methylpseudouracil
  misc_difference 423: note = uracil or N1-methylpseudouracil
  misc_difference 425: note = uracil or N1-methylpseudouracil
  misc_difference 428: note = uracil or N1-methylpseudouracil
  misc_difference 431: note = uracil or N1-methylpseudouracil
  misc_difference 433: note = uracil or N1-methylpseudouracil
  misc_difference 442: note = uracil or N1-methylpseudouracil
  misc_difference 446: note = uracil or N1-methylpseudouracil
  misc_difference 449: note = uracil or N1-methylpseudouracil
  misc_difference 457: note = uracil or N1-methylpseudouracil
  misc_difference 474: note = uracil or N1-methylpseudouracil
  misc_difference 483: note = uracil or N1-methylpseudouracil
  misc_difference 485: note = uracil or N1-methylpseudouracil
  misc_difference 490: note = uracil or N1-methylpseudouracil
  misc_difference 500: note = uracil or N1-methylpseudouracil
  misc_difference 506: note = uracil or N1-methylpseudouracil
  misc_difference 509: note = uracil or N1-methylpseudouracil
  misc_difference 511: note = uracil or N1-methylpseudouracil
  misc_difference 512: note = uracil or N1-methylpseudouracil
  misc_difference 517: note = uracil or N1-methylpseudouracil
  misc_difference 518: note = uracil or N1-methylpseudouracil
  misc_difference 532: note = uracil or N1-methylpseudouracil
  misc_difference 544: note = uracil or N1-methylpseudouracil
  misc_difference 545: note = uracil or N1-methylpseudouracil
  misc_difference 547: note = uracil or N1-methylpseudouracil
  misc_difference 548: note = uracil or N1-methylpseudouracil
  misc_difference 551: note = uracil or N1-methylpseudouracil
  misc_difference 554: note = uracil or N1-methylpseudouracil
  misc_difference 560: note = uracil or N1-methylpseudouracil
  misc_difference 563: note = uracil or N1-methylpseudouracil
  misc_difference 566: note = uracil or N1-methylpseudouracil
  misc_difference 572: note = uracil or N1-methylpseudouracil
  misc_difference 590: note = uracil or N1-methylpseudouracil
  misc_difference 596: note = uracil or N1-methylpseudouracil
  misc_difference 599: note = uracil or N1-methylpseudouracil
  misc_difference 603: note = uracil or N1-methylpseudouracil
  misc_difference 608: note = uracil or N1-methylpseudouracil
  misc_difference 610: note = uracil or N1-methylpseudouracil
  misc_difference 611: note = uracil or N1-methylpseudouracil
  misc_difference 620: note = uracil or N1-methylpseudouracil
  misc_difference 626: note = uracil or N1-methylpseudouracil
  misc_difference 644: note = uracil or N1-methylpseudouracil
  misc_difference 647: note = uracil or N1-methylpseudouracil
  misc_difference 656: note = uracil or N1-methylpseudouracil
  misc_difference 658: note = uracil or N1-methylpseudouracil
  misc_difference 659: note = uracil or N1-methylpseudouracil
  misc_difference 665: note = uracil or N1-methylpseudouracil
  misc_difference 673: note = uracil or N1-methylpseudouracil
  misc_difference 677: note = uracil or N1-methylpseudouracil
  misc_difference 689: note = uracil or N1-methylpseudouracil
  misc_difference 695: note = uracil or N1-methylpseudouracil
  misc_difference 697: note = uracil or N1-methylpseudouracil
  misc_difference 698: note = uracil or N1-methylpseudouracil
  misc_difference 707: note = uracil or N1-methylpseudouracil
  misc_difference 719: note = uracil or N1-methylpseudouracil
  misc_difference 726: note = uracil or N1-methylpseudouracil
  misc_difference 733: note = uracil or N1-methylpseudouracil
  misc_difference 734: note = uracil or N1-methylpseudouracil
  misc_difference 736: note = uracil or N1-methylpseudouracil
  misc_difference 737: note = uracil or N1-methylpseudouracil
  misc_difference 743: note = uracil or N1-methylpseudouracil
  misc_difference 746: note = uracil or N1-methylpseudouracil
  misc_difference 752: note = uracil or N1-methylpseudouracil
  misc_difference 754: note = uracil or N1-methylpseudouracil
  misc_difference 758: note = uracil or N1-methylpseudouracil
  misc_difference 766: note = uracil or N1-methylpseudouracil
  misc_difference 780: note = uracil or N1-methylpseudouracil
  misc_difference 785: note = uracil or N1-methylpseudouracil
  misc_difference 797: note = uracil or N1-methylpseudouracil
  misc_difference 800: note = uracil or N1-methylpseudouracil
  misc_difference 802: note = uracil or N1-methylpseudouracil
  misc_difference 811: note = uracil or N1-methylpseudouracil
  misc_difference 812: note = uracil or N1-methylpseudouracil
  misc_difference 814: note = uracil or N1-methylpseudouracil
  misc_difference 825: note = uracil or N1-methylpseudouracil
  misc_difference 832: note = uracil or N1-methylpseudouracil
  misc_difference 833: note = uracil or N1-methylpseudouracil
  misc_difference 837: note = uracil or N1-methylpseudouracil
  misc_difference 844: note = uracil or N1-methylpseudouracil
  misc_difference 846: note = uracil or N1-methylpseudouracil
  misc_difference 863: note = uracil or N1-methylpseudouracil
  misc_difference 865: note = uracil or N1-methylpseudouracil
  misc_difference 866: note = uracil or N1-methylpseudouracil
  misc_difference 871: note = uracil or N1-methylpseudouracil
  misc_difference 874: note = uracil or N1-methylpseudouracil
  misc_difference 875: note = uracil or N1-methylpseudouracil
  misc_difference 881: note = uracil or N1-methylpseudouracil
  misc_difference 884: note = uracil or N1-methylpseudouracil
  misc_difference 887: note = uracil or N1-methylpseudouracil
  misc_difference 893: note = uracil or N1-methylpseudouracil
  misc_difference 921: note = uracil or N1-methylpseudouracil
  misc_difference 928: note = uracil or N1-methylpseudouracil
  misc_difference 929: note = uracil or N1-methylpseudouracil
  misc_difference 932: note = uracil or N1-methylpseudouracil
  misc_difference 941: note = uracil or N1-methylpseudouracil
  misc_difference 949: note = uracil or N1-methylpseudouracil
  misc_difference 953: note = uracil or N1-methylpseudouracil
  misc_difference 957: note = uracil or N1-methylpseudouracil
  misc_difference 960: note = uracil or N1-methylpseudouracil
  misc_difference 973: note = uracil or N1-methylpseudouracil
  misc_difference 974: note = uracil or N1-methylpseudouracil
  misc_difference 977: note = uracil or N1-methylpseudouracil
  misc_difference 979: note = uracil or N1-methylpseudouracil
  misc_difference 986: note = uracil or N1-methylpseudouracil
  misc_difference 999: note = uracil or N1-methylpseudouracil
  misc_difference 1004: note = uracil or N1-methylpseudouracil
  misc_difference 1012: note = uracil or N1-methylpseudouracil
  misc_difference 1013: note = uracil or N1-methylpseudouracil
  misc_difference 1016: note = uracil or N1-methylpseudouracil
  misc_difference 1019: note = uracil or N1-methylpseudouracil
  misc_difference 1040: note = uracil or N1-methylpseudouracil
  misc_difference 1051: note = uracil or N1-methylpseudouracil
  misc_difference 1060: note = uracil or N1-methylpseudouracil
  misc_difference 1064: note = uracil or N1-methylpseudouracil
  misc_difference 1065: note = uracil or N1-methylpseudouracil
  misc_difference 1073: note = uracil or N1-methylpseudouracil
  misc_difference 1074: note = uracil or N1-methylpseudouracil
  misc_difference 1076: note = uracil or N1-methylpseudouracil
  misc_difference 1078: note = uracil or N1-methylpseudouracil
  misc_difference 1080: note = uracil or N1-methylpseudouracil
  misc_difference 1082: note = uracil or N1-methylpseudouracil
  misc_difference 1090: note = uracil or N1-methylpseudouracil
  misc_difference 1097: note = uracil or N1-methylpseudouracil
  misc_difference 1103: note = uracil or N1-methylpseudouracil
  misc_difference 1106: note = uracil or N1-methylpseudouracil
  misc_difference 1114: note = uracil or N1-methylpseudouracil
  misc_difference 1118: note = uracil or N1-methylpseudouracil
  misc_difference 1121: note = uracil or N1-methylpseudouracil
  misc_difference 1124: note = uracil or N1-methylpseudouracil
  misc_difference 1128: note = uracil or N1-methylpseudouracil
  misc_difference 1143: note = uracil or N1-methylpseudouracil
  misc_difference 1178: note = uracil or N1-methylpseudouracil
  misc_difference 1208: note = uracil or N1-methylpseudouracil
  misc_difference 1211: note = uracil or N1-methylpseudouracil
  misc_difference 1216: note = uracil or N1-methylpseudouracil
  misc_difference 1217: note = uracil or N1-methylpseudouracil
  misc_difference 1220: note = uracil or N1-methylpseudouracil
  misc_difference 1229: note = uracil or N1-methylpseudouracil
  misc_difference 1249: note = uracil or N1-methylpseudouracil
  misc_difference 1253: note = uracil or N1-methylpseudouracil
  misc_difference 1256: note = uracil or N1-methylpseudouracil
atgggcagcagcaagagcaagcctaaggaccctagccagagaagaagaggcggaggctccgcccacgccatggagaacagctggaccatcagcaaggagtaccacatcgacgaggaggtgggcttcgccctgcctaaccctcaggagaacctgcctgacttctacaacgactggatgttcatcgccaagcacttgccggacctgatcgagagcggccagctgagagagagagtggagaagctgaacatgctgagcatcgaccacctgaccgaccacaagagccagagactggccagactggtgctgggctgcatcaccatggcctacgtgtggggcaagggccacggcgacgtgagaaaggtgctgcctagaaacatcgccgtgccttactgccagctgagcaagaagctggagctgcctcctatcctggtgtacgccgactgcgtgctggccaactggaagaagaaggaccctaacaagcctctgacctacgagaacatggacgtgctgttcagcttcagagacggcgactgcagcaagggcttcttcctggtgagcctgctggtggagatcgccgccgccagcgccatcaaggtgatccctaccgtgttcaaggccatgcagatgcaggagagagacaccctgctgaaggccctgttggagatagccagctgcctggagaaggcactgcaggtgttccaccagatccacgaccacgtgaaccctaaggccttcttcagcgtgctgagaatctacctgagcggctggaagggcaaccctcagctgagcgacggcctggtctacgagggcttctgggaggaccctaaggagttcgctggcggctctgccggccagagcagcgtgttccagtgcttcgacgtgctgctgggcatccaacaaaccgcaggaggcggccacgctgcacagttcctgcaggacatgagaagatacatgcctcctgcccacagaaacttcctgtgcagcctggagagcaaccctagcgtgagagagttcgtgctgagcaagggcgacgccggcctgagagaggcctacgacgcctgcgttaaggcccttgtgtctctgagaagctaccacctgcagatcgtgaccaagtacatcctgatccctgccagccagcagcctaaggagaacaagaccagcgaggacccaagcaagctggaggccaagggcaccggcggcaccgacctgatgaacttcctgaagaccgtgagaagcaccaccgagaagtccctcctgaaggagggc

SEQ ID NO: 20 - protein, 438 aa, synthetic construct
MSGCPFLGNNFGYTFKKLPVEGSEEDKSQTGVNRASKGGLIYGNYLHLEKVLNAQELQSETKGNKIHDEHLFIITHQAYELWFKQILWELDSVREIFQNGHVRDERNMLKVVSRMHRVSVILKLLVQQFSILETMTALDFNDFREYLSPASGFQSLQFRLLENKIGVLQNMRVPYNRRHYRDNFKGEENELLLKSEQEKTLLELVEAWLERTPGLEPHGFNFWGKLEKNITRGLEEEFIRIQAKEESEEKEEQVAEFQKQKEVLLSLFDEKRHEHLLSKGERRLSYRALQGALMIYFYREEPRFQVPFQLLTSLMDIDSLMTKWRYNHVCMVHRMLGSKAGTGGSSGYHYLRSTVSDRYKVFVDLFNLSTYLIPRHWIPKMNPTIHKFLYTAEYCDSSYFSSDESDGGGGGSGGGGSYRLKKISKEEKTPGCVKIKKC

SEQ ID NO: 21 - RNA, 1314 nt, synthetic construct
  source 1..1314: mol_type = other RNA
  misc_difference 2: note = uracil or N1-methylpseudouracil
  misc_difference 10: note = uracil or N1-methylpseudouracil
  misc_difference 16: note = uracil or N1-methylpseudouracil
  misc_difference 17: note = uracil or N1-methylpseudouracil
  misc_difference 20: note = uracil or N1-methylpseudouracil
  misc_difference 31: note = uracil or N1-methylpseudouracil
  misc_difference 32: note = uracil or N1-methylpseudouracil
  misc_difference 37: note = uracil or N1-methylpseudouracil
  misc_difference 43: note = uracil or N1-methylpseudouracil
  misc_difference 44: note = uracil or N1-methylpseudouracil
  misc_difference 53: note = uracil or N1-methylpseudouracil
  misc_difference 59: note = uracil or N1-methylpseudouracil
  misc_difference 95: note = uracil or N1-methylpseudouracil
  misc_difference 119: note = uracil or N1-methylpseudouracil
  misc_difference 122: note = uracil or N1-methylpseudouracil
  misc_difference 124: note = uracil or N1-methylpseudouracil
  misc_difference 133: note = uracil or N1-methylpseudouracil
  misc_difference 137: note = uracil or N1-methylpseudouracil
  misc_difference 143: note = uracil or N1-methylpseudouracil
  misc_difference 152: note = uracil or N1-methylpseudouracil
  misc_difference 155: note = uracil or N1-methylpseudouracil
  misc_difference 170: note = uracil or N1-methylpseudouracil
  misc_difference 197: note = uracil or N1-methylpseudouracil
  misc_difference 212: note = uracil or N1-methylpseudouracil
  misc_difference 214: note = uracil or N1-methylpseudouracil
  misc_difference 215: note = uracil or N1-methylpseudouracil
  misc_difference 218: note = uracil or N1-methylpseudouracil
  misc_difference 221: note = uracil or N1-methylpseudouracil
  misc_difference 235: note = uracil or N1-methylpseudouracil
  misc_difference 242: note = uracil or N1-methylpseudouracil
  misc_difference 244: note = uracil or N1-methylpseudouracil
  misc_difference 247: note = uracil or N1-methylpseudouracil
  misc_difference 248: note = uracil or N1-methylpseudouracil
  misc_difference 257: note = uracil or N1-methylpseudouracil
  misc_difference 260: note = uracil or N1-methylpseudouracil
  misc_difference 262: note = uracil or N1-methylpseudouracil
  misc_difference 269: note = uracil or N1-methylpseudouracil
  misc_difference 278: note = uracil or N1-methylpseudouracil
  misc_difference 287: note = uracil or N1-methylpseudouracil
  misc_difference 289: note = uracil or N1-methylpseudouracil
  misc_difference 290: note = uracil or N1-methylpseudouracil
  misc_difference 305: note = uracil or N1-methylpseudouracil
  misc_difference 323: note = uracil or N1-methylpseudouracil
  misc_difference 326: note = uracil or N1-methylpseudouracil
  misc_difference 332: note = uracil or N1-methylpseudouracil
  misc_difference 335: note = uracil or N1-methylpseudouracil
  misc_difference 344: note = uracil or N1-methylpseudouracil
  misc_difference 353: note = uracil or N1-methylpseudouracil
  misc_difference 359: note = uracil or N1-methylpseudouracil
  misc_difference 362: note = uracil or N1-methylpseudouracil
  misc_difference 365: note = uracil or N1-methylpseudouracil
  misc_difference 371: note = uracil or N1-methylpseudouracil
  misc_difference 374: note = uracil or N1-methylpseudouracil
  misc_difference 377: note = uracil or N1-methylpseudouracil
  misc_difference 385: note = uracil or N1-methylpseudouracil
  misc_difference 386: note = uracil or N1-methylpseudouracil
  misc_difference 392: note = uracil or N1-methylpseudouracil
  misc_difference 395: note = uracil or N1-methylpseudouracil
  misc_difference 404: note = uracil or N1-methylpseudouracil
  misc_difference 413: note = uracil or N1-methylpseudouracil
  misc_difference 418: note = uracil or N1-methylpseudouracil
  misc_difference 419: note = uracil or N1-methylpseudouracil
  misc_difference 427: note = uracil or N1-methylpseudouracil
  misc_difference 428: note = uracil or N1-methylpseudouracil
  misc_difference 436: note = uracil or N1-methylpseudouracil
  misc_difference 439: note = uracil or N1-methylpseudouracil
  misc_difference 440: note = uracil or N1-methylpseudouracil
  misc_difference 451: note = uracil or N1-methylpseudouracil
  misc_difference 457: note = uracil or N1-methylpseudouracil
  misc_difference 458: note = uracil or N1-methylpseudouracil
  misc_difference 459: note = uracil or N1-methylpseudouracil
  misc_difference 467: note = uracil or N1-methylpseudouracil
  misc_difference 472: note = uracil or N1-methylpseudouracil
  misc_difference 473: note = uracil or N1-methylpseudouracil
  misc_difference 479: note = uracil or N1-methylpseudouracil
  misc_difference 482: note = uracil or N1-methylpseudouracil
  misc_difference 494: note = uracil or N1-methylpseudouracil
  misc_difference 500: note = uracil or N1-methylpseudouracil
  misc_difference 503: note = uracil or N1-methylpseudouracil
  misc_difference 512: note = uracil or N1-methylpseudouracil
  misc_difference 518: note = uracil or N1-methylpseudouracil
  misc_difference 523: note = uracil or N1-methylpseudouracil
  misc_difference 538: note = uracil or N1-methylpseudouracil
  misc_difference 550: note = uracil or N1-methylpseudouracil
  misc_difference 551: note = uracil or N1-methylpseudouracil
  misc_difference 572: note = uracil or N1-methylpseudouracil
  misc_difference 575: note = uracil or N1-methylpseudouracil
  misc_difference 578: note = uracil or N1-methylpseudouracil
  misc_difference 602: note = uracil or N1-methylpseudouracil
  misc_difference 605: note = uracil or N1-methylpseudouracil
  misc_difference 611: note = uracil or N1-methylpseudouracil
  misc_difference 614: note = uracil or N1-methylpseudouracil
  misc_difference 622: note = uracil or N1-methylpseudouracil
  misc_difference 626: note = uracil or N1-methylpseudouracil
  misc_difference 644: note = uracil or N1-methylpseudouracil
  misc_difference 658: note = uracil or N1-methylpseudouracil
  misc_difference 659: note = uracil or N1-methylpseudouracil
  misc_difference 664: note = uracil or N1-methylpseudouracil
  misc_difference 665: note = uracil or N1-methylpseudouracil
  misc_difference 667: note = uracil or N1-methylpseudouracil
  misc_difference 677: note = uracil or N1-methylpseudouracil
  misc_difference 689: note = uracil or N1-methylpseudouracil
  misc_difference 701: note = uracil or N1-methylpseudouracil
  misc_difference 712: note = uracil or N1-methylpseudouracil
  misc_difference 713: note = uracil or N1-methylpseudouracil
  misc_difference 716: note = uracil or N1-methylpseudouracil
  misc_difference 722: note = uracil or N1-methylpseudouracil
  misc_difference 761: note = uracil or N1-methylpseudouracil
  misc_difference 769: note = uracil or N1-methylpseudouracil
  misc_difference 770: note = uracil or N1-methylpseudouracil
  misc_difference 788: note = uracil or N1-methylpseudouracil
  misc_difference 791: note = uracil or N1-methylpseudouracil
  misc_difference 794: note = uracil or N1-methylpseudouracil
  misc_difference 800: note = uracil or N1-methylpseudouracil
  misc_difference 802: note = uracil or N1-methylpseudouracil
  misc_difference 803: note = uracil or N1-methylpseudouracil
  misc_difference 825: note = uracil or N1-methylpseudouracil
  misc_difference 827: note = uracil or N1-methylpseudouracil
  misc_difference 828: note = uracil or N1-methylpseudouracil
  misc_difference 830: note = uracil or N1-methylpseudouracil
  misc_difference 832: note = uracil or N1-methylpseudouracil
  misc_difference 851: note = uracil or N1-methylpseudouracil
  misc_difference 856: note = uracil or N1-methylpseudouracil
  misc_difference 858: note = uracil or N1-methylpseudouracil
  misc_difference 866: note = uracil or N1-methylpseudouracil
  misc_difference 878: note = uracil or N1-methylpseudouracil
  misc_difference 881: note = uracil or N1-methylpseudouracil
  misc_difference 884: note = uracil or N1-methylpseudouracil
  misc_difference 886: note = uracil or N1-methylpseudouracil
  misc_difference 889: note = uracil or N1-methylpseudouracil
  misc_difference 890: note = uracil or N1-methylpseudouracil
  misc_difference 892: note = uracil or N1-methylpseudouracil
  misc_difference 910: note = uracil or N1-methylpseudouracil
  misc_difference 911: note = uracil or N1-methylpseudouracil
  misc_difference 917: note = uracil or N1-methylpseudouracil
  misc_difference 922: note = uracil or N1-methylpseudouracil
  misc_difference 923: note = uracil or N1-methylpseudouracil
  misc_difference 929: note = uracil or N1-methylpseudouracil
  misc_difference 932: note = uracil or N1-methylpseudouracil
  misc_difference 941: note = uracil or N1-methylpseudouracil
  misc_difference 944: note = uracil or N1-methylpseudouracil
  misc_difference 950: note = uracil or N1-methylpseudouracil
  misc_difference 954: note = uracil or N1-methylpseudouracil
  misc_difference 959: note = uracil or N1-methylpseudouracil
  misc_difference 962: note = uracil or N1-methylpseudouracil
  misc_difference 970: note = uracil or N1-methylpseudouracil
  misc_difference 976: note = uracil or N1-methylpseudouracil
  misc_difference 986: note = uracil or N1-methylpseudouracil
  misc_difference 988: note = uracil or N1-methylpseudouracil
  misc_difference 992: note = uracil or N1-methylpseudouracil
  misc_difference 995: note = uracil or N1-methylpseudouracil
  misc_difference 1004: note = uracil or N1-methylpseudouracil
  misc_difference 1007: note = uracil or N1-methylpseudouracil
  misc_difference 1042: note = uracil or N1-methylpseudouracil
  misc_difference 1048: note = uracil or N1-methylpseudouracil
  misc_difference 1052: note = uracil or N1-methylpseudouracil
  misc_difference 1064: note = uracil or N1-methylpseudouracil
  misc_difference 1075: note = uracil or N1-methylpseudouracil
  misc_difference 1082: note = uracil or N1-methylpseudouracil
  misc_difference 1084: note = uracil or N1-methylpseudouracil
  misc_difference 1085: note = uracil or N1-methylpseudouracil
  misc_difference 1088: note = uracil or N1-methylpseudouracil
  misc_difference 1094: note = uracil or N1-methylpseudouracil
  misc_difference 1096: note = uracil or N1-methylpseudouracil
  misc_difference 1097: note = uracil or N1-methylpseudouracil
  misc_difference 1103: note = uracil or N1-methylpseudouracil
  misc_difference 1111: note = uracil or N1-methylpseudouracil
  misc_difference 1115: note = uracil or N1-methylpseudouracil
  misc_difference 1118: note = uracil or N1-methylpseudouracil
  misc_difference 1119: note = uracil or N1-methylpseudouracil
  misc_difference 1129: note = uracil or N1-methylpseudouracil
  misc_difference 1133: note = uracil or N1-methylpseudouracil
  misc_difference 1142: note = uracil or N1-methylpseudouracil
  misc_difference 1154: note = uracil or N1-methylpseudouracil
  misc_difference 1162: note = uracil or N1-methylpseudouracil
  misc_difference 1163: note = uracil or N1-methylpseudouracil
  misc_difference 1166: note = uracil or N1-methylpseudouracil
  misc_difference 1168: note = uracil or N1-methylpseudouracil
  misc_difference 1180: note = uracil or N1-methylpseudouracil
  misc_difference 1183: note = uracil or N1-methylpseudouracil
  misc_difference 1195: note = uracil or N1-methylpseudouracil
  misc_difference 1198: note = uracil or N1-methylpseudouracil
  misc_difference 1199: note = uracil or N1-methylpseudouracil
  misc_difference 1213: note = uracil or N1-methylpseudouracil
  misc_difference 1227: note = uracil or N1-methylpseudouracil
  misc_difference 1234: note = uracil or N1-methylpseudouracil
  misc_difference 1252: note = uracil or N1-methylpseudouracil
  misc_difference 1259: note = uracil or N1-methylpseudouracil
  misc_difference 1268: note = uracil or N1-methylpseudouracil
  misc_difference 1287: note = uracil or N1-methylpseudouracil
  misc_difference 1294: note = uracil or N1-methylpseudouracil
  misc_difference 1298: note = uracil or N1-methylpseudouracil
  misc_difference 1304: note = uracil or N1-methylpseudouracil
  misc_difference 1312: note = uracil or N1-methylpseudouracil
atgagcggctgccccttcctcggcaacaacttcggctacaccttcaagaagctgcccgtggagggcagcgaggaggacaagagccagaccggcgtgaaccgggccagcaagggaggcctgatctacggcaactacctgcacctggagaaggtgctgaacgcccaggagctgcagagcgagaccaagggcaacaagatccacgacgagcacctgttcatcatcacccaccaggcctacgagctgtggttcaagcagatcctgtgggagctggacagcgtgcgggagatcttccagaacggccacgtgcgggacgagcggaacatgctgaaggtggtgagccggatgcaccgggtgagcgtgatcctgaagctgctggtgcagcagttcagcatcctggagaccatgaccgccctggacttcaacgacttccgggagtacttaagccccgcctccggctttcagagcctgcagttccggctgctggagaacaagatcggcgtgctgcagaacatgcgggtgccctacaaccggcggcactaccgggacaacttcaagggcgaggagaacgagctgctgctaaagagcgagcaggagaagaccctgctggagctggtggaggcctggctggagcggacacccggcctggaaccccacggcttcaacttctggggcaagctggagaagaacatcacccggggactggaggaggagttcatccggatccaggccaaggaggagagcgaagagaaggaggagcaggtggccgagttccagaagcagaaggaggtgctgctgagcctgttcgacgagaagcggcacgagcatcttctgtcgaagggcgaacggcggctgagctatcgggccctgcaaggagccctgatgatctacttctaccgggaggagccccggttccaggtgcccttccagctgctgaccagcctgatggacatcgatagcctgatgaccaagtggcggtacaaccacgtgtgcatggtgcaccggatgctgggcagcaaggccggcaccggaggaagcagcggctaccactacctgcggagcaccgtgagcgaccggtacaaggtgttcgtggacctgttcaacctgagcacctacctgattccccggcactggatccccaagatgaaccccaccatccacaagttcctgtacaccgccgagtactgcgacagcagctacttcagcagcgacgaatcagacggcggcggtggaggatcaggaggcggcggaagctaccggctgaagaagatcagcaaggaagagaagactcccggctgcgtgaagatcaagaagtgc

SEQ ID NO: 22 - protein, 426 aa, synthetic construct
MGSSKSKPKDPSQRRRGGGSSGCPFLGNNFGYTFKKLPVEGSEEDKSQTGVNRASKGGLIYGNYLHLEKVLNAQELQSETKGNKIHDEHLFIITHQAYELWFKQILWELDSVREIFQNGHVRDERNMLKVVSRMHRVSVILKLLVQQFSILETMTALDFNDFREYLSPASGFQSLQFRLLENKIGVLQNMRVPYNRRHYRDNFKGEENELLLKSEQEKTLLELVEAWLERTPGLEPHGFNFWGKLEKNITRGLEEEFIRIQAKEESEEKEEQVAEFQKQKEVLLSLFDEKRHEHLLSKGERRLSYRALQGALMIYFYREEPRFQVPFQLLTSLMDIDSLMTKWRYNHVCMVHRMLGSKAGTGGSSGYHYLRSTVSDRYKVFVDLFNLSTYLIPRHWIPKMNPTIHKFLYTAEYCDSSYFSSDESDG

SEQ ID NO: 23 - RNA, 1278 nt, synthetic construct
  source 1..1278: mol_type = other RNA
  misc_difference 2: note = uracil or N1-methylpseudouracil
  misc_difference 24: note = uracil or N1-methylpseudouracil
  misc_difference 33: note = uracil or N1-methylpseudouracil
  misc_difference 58: note = uracil or N1-methylpseudouracil
  misc_difference 67: note = uracil or N1-methylpseudouracil
  misc_difference 73: note = uracil or N1-methylpseudouracil
  misc_difference 74: note = uracil or N1-methylpseudouracil
  misc_difference 77: note = uracil or N1-methylpseudouracil
  misc_difference 88: note = uracil or N1-methylpseudouracil
  misc_difference 89: note = uracil or N1-methylpseudouracil
  misc_difference 94: note = uracil or N1-methylpseudouracil
  misc_difference 100: note = uracil or N1-methylpseudouracil
  misc_difference 101: note = uracil or N1-methylpseudouracil
  misc_difference 110: note = uracil or N1-methylpseudouracil
  misc_difference 116: note = uracil or N1-methylpseudouracil
  misc_difference 152: note = uracil or N1-methylpseudouracil
  misc_difference 176: note = uracil or N1-methylpseudouracil
  misc_difference 179: note = uracil or N1-methylpseudouracil
  misc_difference 181: note = uracil or N1-methylpseudouracil
  misc_difference 190: note = uracil or N1-methylpseudouracil
  misc_difference 194: note = uracil or N1-methylpseudouracil
  misc_difference 200: note = uracil or N1-methylpseudouracil
  misc_difference 209: note = uracil or N1-methylpseudouracil
  misc_difference 212: note = uracil or N1-methylpseudouracil
  misc_difference 227: note = uracil or N1-methylpseudouracil
  misc_difference 254: note = uracil or N1-methylpseudouracil
  misc_difference 269: note = uracil or N1-methylpseudouracil
  misc_difference 271: note = uracil or N1-methylpseudouracil
  misc_difference 272: note = uracil or N1-methylpseudouracil
  misc_difference 275: note = uracil or N1-methylpseudouracil
  misc_difference 278: note = uracil or N1-methylpseudouracil
  misc_difference 292: note = uracil or N1-methylpseudouracil
  misc_difference 299: note = uracil or N1-methylpseudouracil
  misc_difference 301: note = uracil or N1-methylpseudouracil
  misc_difference 304: note = uracil or N1-methylpseudouracil
  misc_difference 305: note = uracil or N1-methylpseudouracil
  misc_difference 314: note = uracil or N1-methylpseudouracil
  misc_difference 317: note = uracil or N1-methylpseudouracil
  misc_difference 319: note = uracil or N1-methylpseudouracil
  misc_difference 326: note = uracil or N1-methylpseudouracil
  misc_difference 335: note = uracil or N1-methylpseudouracil
  misc_difference 344: note = uracil or N1-methylpseudouracil
  misc_difference 346: note = uracil or N1-methylpseudouracil
  misc_difference 347: note = uracil or N1-methylpseudouracil
  misc_difference 362: note = uracil or N1-methylpseudouracil
  misc_difference 380: note = uracil or N1-methylpseudouracil
  misc_difference 383: note = uracil or N1-methylpseudouracil
  misc_difference 389: note = uracil or N1-methylpseudouracil
  misc_difference 392: note = uracil or N1-methylpseudouracil
  misc_difference 401: note = uracil or N1-methylpseudouracil
  misc_difference 410: note = uracil or N1-methylpseudouracil
  misc_difference 416: note = uracil or N1-methylpseudouracil
  misc_difference 419: note = uracil or N1-methylpseudouracil
  misc_difference 422: note = uracil or N1-methylpseudouracil
  misc_difference 428: note = uracil or N1-methylpseudouracil
  misc_difference 431: note = uracil or N1-methylpseudouracil
  misc_difference 434: note = uracil or N1-methylpseudouracil
  misc_difference 442: note = uracil or N1-methylpseudouracil
  misc_difference 443: note = uracil or N1-methylpseudouracil
  misc_difference 449: note = uracil or N1-methylpseudouracil
  misc_difference 452: note = uracil or N1-methylpseudouracil
  misc_difference 461: note = uracil or N1-methylpseudouracil
  misc_difference 470: note = uracil or N1-methylpseudouracil
  misc_difference 475: note = uracil or N1-methylpseudouracil
  misc_difference 476: note = uracil or N1-methylpseudouracil
  misc_difference 484: note = uracil or N1-methylpseudouracil
  misc_difference 485: note = uracil or N1-methylpseudouracil
  misc_difference 493: note = uracil or N1-methylpseudouracil
  misc_difference 496: note = uracil or N1-methylpseudouracil
  misc_difference 497: note = uracil or N1-methylpseudouracil
  misc_difference 508: note = uracil or N1-methylpseudouracil
  misc_difference 514: note = uracil or N1-methylpseudouracil
  misc_difference 515: note = uracil or N1-methylpseudouracil
  misc_difference 516: note = uracil or N1-methylpseudouracil
  misc_difference 524: note = uracil or N1-methylpseudouracil
  misc_difference 529: note = uracil or N1-methylpseudouracil
  misc_difference 530: note = uracil or N1-methylpseudouracil
  misc_difference 536: note = uracil or N1-methylpseudouracil
  misc_difference 539: note = uracil or N1-methylpseudouracil
  misc_difference 551: note = uracil or N1-methylpseudouracil
  misc_difference 557: note = uracil or N1-methylpseudouracil
  misc_difference 560: note = uracil or N1-methylpseudouracil
  misc_difference 569: note = uracil or N1-methylpseudouracil
  misc_difference 575: note = uracil or N1-methylpseudouracil
  misc_difference 580: note = uracil or N1-methylpseudouracil
  misc_difference 595: note = uracil or N1-methylpseudouracil
  misc_difference 607: note = uracil or N1-methylpseudouracil
  misc_difference 608: note = uracil or N1-methylpseudouracil
  misc_difference 629: note = uracil or N1-methylpseudouracil
  misc_difference 632: note = uracil or N1-methylpseudouracil
  misc_difference 635: note = uracil or N1-methylpseudouracil
  misc_difference 659: note = uracil or N1-methylpseudouracil
  misc_difference 662: note = uracil or N1-methylpseudouracil
  misc_difference 668: note = uracil or N1-methylpseudouracil
  misc_difference 671: note = uracil or N1-methylpseudouracil
  misc_difference 679: note = uracil or N1-methylpseudouracil
  misc_difference 683: note = uracil or N1-methylpseudouracil
  misc_difference 701: note = uracil or N1-methylpseudouracil
  misc_difference 715: note = uracil or N1-methylpseudouracil
  misc_difference 716: note = uracil or N1-methylpseudouracil
  misc_difference 721: note = uracil or N1-methylpseudouracil
  misc_difference 722: note = uracil or N1-methylpseudouracil
  misc_difference 724: note = uracil or N1-methylpseudouracil
  misc_difference 734: note = uracil or N1-methylpseudouracil
  misc_difference 746: note = uracil or N1-methylpseudouracil
  misc_difference 758: note = uracil or N1-methylpseudouracil
  misc_difference 769: note = uracil or N1-methylpseudouracil
  misc_difference 770: note = uracil or N1-methylpseudouracil
  misc_difference 773: note = uracil or N1-methylpseudouracil
  misc_difference 779: note = uracil or N1-methylpseudouracil
  misc_difference 818: note = uracil or N1-methylpseudouracil
  misc_difference 826: note = uracil or N1-methylpseudouracil
  misc_difference 827: note = uracil or N1-methylpseudouracil
  misc_difference 845: note = uracil or N1-methylpseudouracil
  misc_difference 848: note = uracil or N1-methylpseudouracil
  misc_difference 851: note = uracil or N1-methylpseudouracil
  misc_difference 857: note = uracil or N1-methylpseudouracil
  misc_difference 859: note = uracil or N1-methylpseudouracil
  misc_difference 860: note = uracil or N1-methylpseudouracil
  misc_difference 882: note = uracil or N1-methylpseudouracil
  misc_difference 884: note = uracil or N1-methylpseudouracil
  misc_difference 885: note = uracil or N1-methylpseudouracil
  misc_difference 887: note = uracil or N1-methylpseudouracil
  misc_difference 889: note = uracil or N1-methylpseudouracil
  misc_difference 908: note = uracil or N1-methylpseudouracil
  misc_difference 913: note = uracil or N1-methylpseudouracil
  misc_difference 915: note = uracil or N1-methylpseudouracil
  misc_difference 923: note = uracil or N1-methylpseudouracil
  misc_difference 935: note = uracil or N1-methylpseudouracil
  misc_difference 938: note = uracil or N1-methylpseudouracil
  misc_difference 941: note = uracil or N1-methylpseudouracil
  misc_difference 943: note = uracil or N1-methylpseudouracil
  misc_difference 946: note = uracil or N1-methylpseudouracil
  misc_difference 947: note = uracil or N1-methylpseudouracil
  misc_difference 949: note = uracil or N1-methylpseudouracil
  misc_difference 967: note = uracil or N1-methylpseudouracil
  misc_difference 968: note = uracil or N1-methylpseudouracil
  misc_difference 974: note = uracil or N1-methylpseudouracil
  misc_difference 979: note = uracil or N1-methylpseudouracil
  misc_difference 980: note = uracil or N1-methylpseudouracil
  misc_difference 986: note = uracil or N1-methylpseudouracil
  misc_difference 989: note = uracil or N1-methylpseudouracil
  misc_difference 998: note = uracil or N1-methylpseudouracil
  misc_difference 1001: note = uracil or N1-methylpseudouracil
  misc_difference 1007: note = uracil or N1-methylpseudouracil
  misc_difference 1011: note = uracil or N1-methylpseudouracil
  misc_difference 1016: note = uracil or N1-methylpseudouracil
  misc_difference 1019: note = uracil or N1-methylpseudouracil
  misc_difference 1027: note = uracil or N1-methylpseudouracil
  misc_difference 1033: note = uracil or N1-methylpseudouracil
  misc_difference 1043: note = uracil or N1-methylpseudouracil
  misc_difference 1045: note = uracil or N1-methylpseudouracil
  misc_difference 1049: note = uracil or N1-methylpseudouracil
  misc_difference 1052: note = uracil or N1-methylpseudouracil
  misc_difference 1061: note = uracil or N1-methylpseudouracil
  misc_difference 1064: note = uracil or N1-methylpseudouracil
  misc_difference 1099: note = uracil or N1-methylpseudouracil
  misc_difference 1105: note = uracil or N1-methylpseudouracil
  misc_difference 1109: note = uracil or N1-methylpseudouracil
  misc_difference 1121: note = uracil or N1-methylpseudouracil
  misc_difference 1132: note = uracil or N1-methylpseudouracil
  misc_difference 1139: note = uracil or N1-methylpseudouracil
  misc_difference 1141: note = uracil or N1-methylpseudouracil
  misc_difference 1142: note = uracil or N1-methylpseudouracil
  misc_difference 1145: note = uracil or N1-methylpseudouracil
  misc_difference 1151: note = uracil or N1-methylpseudouracil
  misc_difference 1153: note = uracil or N1-methylpseudouracil
  misc_difference 1154: note = uracil or N1-methylpseudouracil
  misc_difference 1160: note = uracil or N1-methylpseudouracil
  misc_difference 1168: note = uracil or N1-methylpseudouracil
  misc_difference 1172: note = uracil or N1-methylpseudouracil
  misc_difference 1175: note = uracil or N1-methylpseudouracil
  misc_difference 1176: note = uracil or N1-methylpseudouracil
  misc_difference 1186: note = uracil or N1-methylpseudouracil
  misc_difference 1190: note = uracil or N1-methylpseudouracil
  misc_difference 1199: note = uracil or N1-methylpseudouracil
  misc_difference 1211: note = uracil or N1-methylpseudouracil
  misc_difference 1219: note = uracil or N1-methylpseudouracil
  misc_difference 1220: note = uracil or N1-methylpseudouracil
  misc_difference 1223: note = uracil or N1-methylpseudouracil
  misc_difference 1225: note = uracil or N1-methylpseudouracil
  misc_difference 1237: note = uracil or N1-methylpseudouracil
  misc_difference 1240: note = uracil or N1-methylpseudouracil
  misc_difference 1252: note = uracil or N1-methylpseudouracil
  misc_difference 1255: note = uracil or N1-methylpseudouracil
  misc_difference 1256: note = uracil or N1-methylpseudouracil
  misc_difference 1270: note = uracil or N1-methylpseudouracil
atgggcagcagcaagagcaagcctaaggaccctagccagagaagaagaggcggaggctccagcggctgccccttcctcggcaacaacttcggctacaccttcaagaagctgcccgtggagggcagcgaggaggacaagagccagaccggcgtgaaccgggccagcaagggaggcctgatctacggcaactacctgcacctggagaaggtgctgaacgcccaggagctgcagagcgagaccaagggcaacaagatccacgacgagcacctgttcatcatcacccaccaggcctacgagctgtggttcaagcagatcctgtgggagctggacagcgtgcgggagatcttccagaacggccacgtgcgggacgagcggaacatgctgaaggtggtgagccggatgcaccgggtgagcgtgatcctgaagctgctggtgcagcagttcagcatcctggagaccatgaccgccctggacttcaacgacttccgggagtacttaagccccgcctccggctttcagagcctgcagttccggctgctggagaacaagatcggcgtgctgcagaacatgcgggtgccctacaaccggcggcactaccgggacaacttcaagggcgaggagaacgagctgctgctaaagagcgagcaggagaagaccctgctggagctggtggaggcctggctggagcggacacccggcctggaaccccacggcttcaacttctggggcaagctggagaagaacatcacccggggactggaggaggagttcatccggatccaggccaaggaggagagcgaagagaaggaggagcaggtggccgagttccagaagcagaaggaggtgctgctgagcctgttcgacgagaagcggcacgagcatcttctgtcgaagggcgaacggcggctgagctatcgggccctgcaaggagccctgatgatctacttctaccgggaggagccccggttccaggtgcccttccagctgctgaccagcctgatggacatcgatagcctgatgaccaagtggcggtacaaccacgtgtgcatggtgcaccggatgctgggcagcaaggccggcaccggaggaagcagcggctaccactacctgcggagcaccgtgagcgaccggtacaaggtgttcgtggacctgttcaacctgagcacctacctgattccccggcactggatccccaagatgaaccccaccatccacaagttcctgtacaccgccgagtactgcgacagcagctacttcagcagcgacgaatcagacggc

SEQ ID NO: 24 - RNA, 1308 nt, synthetic construct
  source 1..1308: mol_type = other RNA
  misc_difference 2: note = uracil or N1-methylpseudouracil
  misc_difference 7: note = uracil or N1-methylpseudouracil
  misc_difference 9: note = uracil or N1-methylpseudouracil
  misc_difference 10: note = uracil or N1-methylpseudouracil
  misc_difference 12: note = uracil or N1-methylpseudouracil
  misc_difference 16: note = uracil or N1-methylpseudouracil
  misc_difference 18: note = uracil or N1-methylpseudouracil
  misc_difference 24: note = uracil or N1-methylpseudouracil
  misc_difference 30: note = uracil or N1-methylpseudouracil
  misc_difference 33: note = uracil or N1-methylpseudouracil
  misc_difference 34: note = uracil or N1-methylpseudouracil
  misc_difference 36: note = uracil or N1-methylpseudouracil
  misc_difference 58: note = uracil or N1-methylpseudouracil
  misc_difference 60: note = uracil or N1-methylpseudouracil
  misc_difference 63: note = uracil or N1-methylpseudouracil
  misc_difference 66: note = uracil or N1-methylpseudouracil
  misc_difference 69: note = uracil or N1-methylpseudouracil
  misc_difference 71: note = uracil or N1-methylpseudouracil
  misc_difference 78: note = uracil or N1-methylpseudouracil
  misc_difference 79: note = uracil or N1-methylpseudouracil
  misc_difference 81: note = uracil or N1-methylpseudouracil
  misc_difference 82: note = uracil or N1-methylpseudouracil
  misc_difference 89: note = uracil or N1-methylpseudouracil
  misc_difference 90: note = uracil or N1-methylpseudouracil
  misc_difference 91: note = uracil or N1-methylpseudouracil
  misc_difference 93: note = uracil or N1-methylpseudouracil
  misc_difference 100: note = uracil or N1-methylpseudouracil
  misc_difference 102: note = uracil or N1-methylpseudouracil
  misc_difference 105: note = uracil or N1-methylpseudouracil
  misc_difference 107: note = uracil or N1-methylpseudouracil
  misc_difference 108: note = uracil or N1-methylpseudouracil
  misc_difference 111: note = uracil or N1-methylpseudouracil
  misc_difference 119: note = uracil or N1-methylpseudouracil
  misc_difference 120: note = uracil or N1-methylpseudouracil
  misc_difference 124: note = uracil or N1-methylpseudouracil
  misc_difference 125: note = uracil or N1-methylpseudouracil
  misc_difference 126: note = uracil or N1-methylpseudouracil
  misc_difference 129: note = uracil or N1-methylpseudouracil
  misc_difference 131: note = uracil or N1-methylpseudouracil
  misc_difference 132: note = uracil or N1-methylpseudouracil
  misc_difference 152: note = uracil or N1-methylpseudouracil
  misc_difference 160: note = uracil or N1-methylpseudouracil
  misc_difference 161: note = uracil or N1-methylpseudouracil
  misc_difference 163: note = uracil or N1-methylpseudouracil
  misc_difference 172: note = uracil or N1-methylpseudouracil
  misc_difference 176: note = uracil or N1-methylpseudouracil
  misc_difference 178: note = uracil or N1-methylpseudouracil
  misc_difference 179: note = uracil or N1-methylpseudouracil
  misc_difference 182: note = uracil or N1-methylpseudouracil
  misc_difference 194: note = uracil or N1-methylpseudouracil
  misc_difference 203: note = uracil or N1-methylpseudouracil
  misc_difference 206: note = uracil or N1-methylpseudouracil
  misc_difference 221: note = uracil or N1-methylpseudouracil
  misc_difference 233: note = uracil or N1-methylpseudouracil
  misc_difference 242: note = uracil or N1-methylpseudouracil
  misc_difference 248: note = uracil or N1-methylpseudouracil
  misc_difference 251: note = uracil or N1-methylpseudouracil
  misc_difference 257: note = uracil or N1-methylpseudouracil
  misc_difference 266: note = uracil or N1-methylpseudouracil
  misc_difference 280: note = uracil or N1-methylpseudouracil
  misc_difference 289: note = uracil or N1-methylpseudouracil
  misc_difference 290: note = uracil or N1-methylpseudouracil
  misc_difference 294: note = uracil or N1-methylpseudouracil
  misc_difference 299: note = uracil or N1-methylpseudouracil
  misc_difference 302: note = uracil or N1-methylpseudouracil
  misc_difference 305: note = uracil or N1-methylpseudouracil
  misc_difference 310: note = uracil or N1-methylpseudouracil
  misc_difference 314: note = uracil or N1-methylpseudouracil
  misc_difference 320: note = uracil or N1-methylpseudouracil
  misc_difference 325: note = uracil or N1-methylpseudouracil
  misc_difference 329: note = uracil or N1-methylpseudouracil
  misc_difference 331: note = uracil or N1-methylpseudouracil
  misc_difference 348: note = uracil or N1-methylpseudouracil
  misc_difference 353: note = uracil or N1-methylpseudouracil
  misc_difference 362: note = uracil or N1-methylpseudouracil
  misc_difference 365: note = uracil or N1-methylpseudouracil
  misc_difference 377: note = uracil or N1-methylpseudouracil
  misc_difference 383: note = uracil or N1-methylpseudouracil
  misc_difference 388: note = uracil or N1-methylpseudouracil
  misc_difference 391: note = uracil or N1-methylpseudouracil
  misc_difference 398: note = uracil or N1-methylpseudouracil
  misc_difference 410: note = uracil or N1-methylpseudouracil
  misc_difference 416: note = uracil or N1-methylpseudouracil
  misc_difference 420: note = uracil or N1-methylpseudouracil
  misc_difference 425: note = uracil or N1-methylpseudouracil
  misc_difference 428: note = uracil or N1-methylpseudouracil
  misc_difference 431: note = uracil or N1-methylpseudouracil
  misc_difference 433: note = uracil or N1-methylpseudouracil
  misc_difference 442: note = uracil or N1-methylpseudouracil
  misc_difference 446: note = uracil or N1-methylpseudouracil
  misc_difference 449: note = uracil or N1-methylpseudouracil
  misc_difference 457: note = uracil or N1-methylpseudouracil
  misc_difference 485: note = uracil or N1-methylpseudouracil
  misc_difference 490: note = uracil or N1-methylpseudouracil
  misc_difference 500: note = uracil or N1-methylpseudouracil
  misc_difference 506: note = uracil or N1-methylpseudouracil
  misc_difference 509: note = uracil or N1-methylpseudouracil
  misc_difference 511: note = uracil or N1-methylpseudouracil
  misc_difference 512: note = uracil or N1-methylpseudouracil
  misc_difference 514: note = uracil or N1-methylpseudouracil
  misc_difference 517: note = uracil or N1-methylpseudouracil
  misc_difference 518: note = uracil or N1-methylpseudouracil
  misc_difference 532: note = uracil or N1-methylpseudouracil
  misc_difference 544: note = uracil or N1-methylpseudouracil
  misc_difference 545: note = uracil or N1-methylpseudouracil
  misc_difference 547: note = uracil or N1-methylpseudouracil
  misc_difference 548: note = uracil or N1-methylpseudouracil
  misc_difference 551: note = uracil or N1-methylpseudouracil
  misc_difference 554: note = uracil or N1-methylpseudouracil
  misc_difference 560: note = uracil or N1-methylpseudouracil
  misc_difference 563: note = uracil or N1-methylpseudouracil
  misc_difference 566: note = uracil or N1-methylpseudouracil
  misc_difference 572: note = uracil or N1-methylpseudouracil
  misc_difference 583: note = uracil or N1-methylpseudouracil
  misc_difference 585: note = uracil or N1-methylpseudouracil
  misc_difference 590: note = uracil or N1-methylpseudouracil
  misc_difference 596: note = uracil or N1-methylpseudouracil
  misc_difference 599: note = uracil or N1-methylpseudouracil
  misc_difference 608: note = uracil or N1-methylpseudouracil
  misc_difference 610: note = uracil or N1-methylpseudouracil
  misc_difference 611: note = uracil or N1-methylpseudouracil
  misc_difference 620: note = uracil or N1-methylpseudouracil
  misc_difference 626: note = uracil or N1-methylpseudouracil
  misc_difference 644: note = uracil or N1-methylpseudouracil
  misc_difference 647: note = uracil or N1-methylpseudouracil
  misc_difference 656: note = uracil or N1-methylpseudouracil
  misc_difference 659: note = uracil or N1-methylpseudouracil
  misc_difference 665: note = uracil or N1-methylpseudouracil
  misc_difference 673: note = uracil or N1-methylpseudouracil
  misc_difference 677: note = uracil or N1-methylpseudouracil
  misc_difference 689: note = uracil or N1-methylpseudouracil
  misc_difference 695: note = uracil or N1-methylpseudouracil
  misc_difference 697: note = uracil or N1-methylpseudouracil
  misc_difference 698: note = uracil or N1-methylpseudouracil
  misc_difference 707: note = uracil or N1-methylpseudouracil
  misc_difference 719: note = uracil or N1-methylpseudouracil
  misc_difference 733: note = uracil or N1-methylpseudouracil
  misc_difference 734: note = uracil or N1-methylpseudouracil
  misc_difference 736: note = uracil or N1-methylpseudouracil
  misc_difference 737: note = uracil or N1-methylpseudouracil
  misc_difference 743: note = uracil or N1-methylpseudouracil
  misc_difference 746: note = uracil or N1-methylpseudouracil
  misc_difference 752: note = uracil or N1-methylpseudouracil
  misc_difference 754: note = uracil or N1-methylpseudouracil
  misc_difference 758: note = uracil or N1-methylpseudouracil
  misc_difference 760: note = uracil or N1-methylpseudouracil
  misc_difference 766: note = uracil or N1-methylpseudouracil
  misc_difference 777: note = uracil or N1-methylpseudouracil
  misc_difference 785: note = uracil or N1-methylpseudouracil
  misc_difference 797: note = uracil or N1-methylpseudouracil
  misc_difference 800: note = uracil or N1-methylpseudouracil
  misc_difference 802: note = uracil or N1-methylpseudouracil
  misc_difference 811: note = uracil or N1-methylpseudouracil
  misc_difference 812: note = uracil or N1-methylpseudouracil
  misc_difference 814: note = uracil or N1-methylpseudouracil
  misc_difference 832: note = uracil or N1-methylpseudouracil
  misc_difference 833: note = uracil or N1-methylpseudouracil
  misc_difference 834: note = uracil or N1-methylpseudouracil
  misc_difference 837: note = uracil or N1-methylpseudouracil
  misc_difference 843: note = uracil or N1-methylpseudouracil
  misc_difference 849: note = uracil or N1-methylpseudouracil
  misc_difference 856: note = uracil or N1-methylpseudouracil
  misc_difference 863: note = uracil or N1-methylpseudouracil
  misc_difference 865: note = uracil or N1-methylpseudouracil
  misc_difference 866: note = uracil or N1-methylpseudouracil
  misc_difference 871: note = uracil or N1-methylpseudouracil
  misc_difference 874: note = uracil or N1-methylpseudouracil
  misc_difference 875: note = uracil or N1-methylpseudouracil
  misc_difference 881: note = uracil or N1-methylpseudouracil
  misc_difference 884: note = uracil or N1-methylpseudouracil
  misc_difference 887: note = uracil or N1-methylpseudouracil
  misc_difference 893: note = uracil or N1-methylpseudouracil
  misc_difference 894: note = uracil or N1-methylpseudouracil
  misc_difference 906: note = uracil or N1-methylpseudouracil
  misc_difference 921: note = uracil or N1-methylpseudouracil
  misc_difference 928: note = uracil or N1-methylpseudouracil
  misc_difference 929: note = uracil or N1-methylpseudouracil
  misc_difference 932: note = uracil or N1-methylpseudouracil
  misc_difference 941: note = uracil or N1-methylpseudouracil
  misc_difference 949: note = uracil or N1-methylpseudouracil
  misc_difference 953: note = uracil or N1-methylpseudouracil
  misc_difference 973: note = uracil or N1-methylpseudouracil
  misc_difference 974: note = uracil or N1-methylpseudouracil
  misc_difference 977: note = uracil or N1-methylpseudouracil
  misc_difference 979: note = uracil or N1-methylpseudouracil
  misc_difference 982: note = uracil or N1-methylpseudouracil
  misc_difference 986: note = uracil or N1-methylpseudouracil
  misc_difference 1000: note = uracil or N1-methylpseudouracil
  misc_difference 1004: note = uracil or N1-methylpseudouracil
  misc_difference 1012: note = uracil or N1-methylpseudouracil
  misc_difference 1013: note = uracil or N1-methylpseudouracil
  misc_difference 1016: note = uracil or N1-methylpseudouracil
  misc_difference 1019: note = uracil or N1-methylpseudouracil
  misc_difference 1021: note = uracil or N1-methylpseudouracil
  misc_difference 1040: note = uracil or N1-methylpseudouracil
  misc_difference 1051: note = uracil or N1-methylpseudouracil
  misc_difference 1060: note = uracil or N1-methylpseudouracil
  misc_difference 1064: note = uracil or N1-methylpseudouracil
  misc_difference 1073: note = uracil or N1-methylpseudouracil
  misc_difference 1076: note = uracil or N1-methylpseudouracil
  misc_difference 1078: note = uracil or N1-methylpseudouracil
  misc_difference 1082: note = uracil or N1-methylpseudouracil
  misc_difference 1090: note = uracil or N1-methylpseudouracil
  misc_difference 1097: note = uracil or N1-methylpseudouracil
  misc_difference 1103: note = uracil or N1-methylpseudouracil
  misc_difference 1106: note = uracil or N1-methylpseudouracil
  misc_difference 1114: note = uracil or N1-methylpseudouracil
  misc_difference 1118: note = uracil or N1-methylpseudouracil
  misc_difference 1121: note = uracil or N1-methylpseudouracil
  misc_difference 1124: note = uracil or N1-methylpseudouracil
  misc_difference 1171: note = uracil or N1-methylpseudouracil
  misc_difference 1178: note = uracil or N1-methylpseudouracil
  misc_difference 1185: note = uracil or N1-methylpseudouracil
  misc_difference 1203: note = uracil or N1-methylpseudouracil
  misc_difference 1208: note = uracil or N1-methylpseudouracil
  misc_difference 1211: note = uracil or N1-methylpseudouracil
  misc_difference 1216: note = uracil or N1-methylpseudouracil
  misc_difference 1217: note = uracil or N1-methylpseudouracil
  misc_difference 1220: note = uracil or N1-methylpseudouracil
  misc_difference 1229: note = uracil or N1-methylpseudouracil
  misc_difference 1253: note = uracil or N1-methylpseudouracil
  misc_difference 1256: note = uracil or N1-methylpseudouracil
  misc_difference 1277: note = uracil or N1-methylpseudouracil
  misc_difference 1284: note = uracil or N1-methylpseudouracil
  misc_difference 1289: note = uracil or N1-methylpseudouracil
  misc_difference 1292: note = uracil or N1-methylpseudouracil
  misc_difference 1298: note = uracil or N1-methylpseudouracil
  misc_difference 1303: note = uracil or N1-methylpseudouracil
atgggatcttctaaatctaaacctaaagatccttctcaaagaagaagaggaggaggatctgctcatgctatggagaattcttggacaatttctaaagaatatcatattgatgaagaagttggatttgctcttcccaacccacaggagaacctgcccgacttctacaacgactggatgttcatcgccaagcacctgcccgacctgatcgagagcgggcagctgcgggaacgggtggagaagctgaacatgctgagcatcgaccacctgaccgaccacaagtcccagcggttggctcggctggtgctgggctgcatcaccatggcctacgtgtggggaaaggggcacggtgacgtgcggaaggtgctgccccgcaacatcgccgtgccctactgccagctgagcaagaagctggagctgcctccgatcctggtgtacgccgactgcgtgctggccaactggaagaagaaggaccccaacaagcccctgacctacgagaacatggacgtgctgttctccttccgggacggggactgcagcaaggggttcttcctggtgagcctgctggtggagatcgccgccgcctctgccatcaaggtgatccccaccgtgttcaaggccatgcagatgcaggagagggacaccctgctgaaggccctgctggagatcgccagctgcctggagaaggccctgcaggtgttccaccagatccacgaccacgtgaaccccaaggccttcttcagcgtgctgcgcatctacctgtccggctggaagggcaatccccagctgagcgacggcctggtgtacgagggcttctgggaggaccccaaggaatttgctggcggtagcgctggccagtccagcgtgttccagtgcttcgacgtgctgctgggcattcagcaaaccgctggaggcggacacgctgcccagttcctgcaggacatgcggcggtacatgccaccggcccaccgcaacttcctgtgctccctggagagcaacccctccgtgcgggagttcgtgctgtccaagggcgacgccggactgagggaggcctacgacgcctgcgtgaaggccctggtgtccctgcgcagctaccacctgcagatcgtgaccaagtacatcctgatccccgcaagccagcagcccaaggagaacaagaccagcgaggacccctccaagctggaagctaagggcaccggcggcactgacctgatgaacttcctgaagaccgtgcggagcaccaccgagaagagcctgctgaaggagggcgggaagccgatcccgaatcccctcctcgggctcgactcgacg

SEQ ID NO: 25 - protein, 569 aa, synthetic construct
MGSAVMDTKKKKDVSSPGGSGGKKNASQKRRSLRVHIPDLSSFAMPLLDGDLEGSGKHSSRKVDSPFGPGSPSKGFFSRGPQPRPSSPMSAPVRPKTSPGSPKTVFPFSYQESPPRSPRRMSFSGIFRSSSKESSPNSNPATSPGGIRFFSRSRKTSGLSSSPSTPTQVTKQHTFPLESYKHEPERLENRIYASSSPPDTGQRFCPSSFQSPTRPPLASPTHYAPSKAAALAAALGPAEAGMLEKLEFEDEAVEDSESGVYMRFMRSHKCYDIVPTSSKLVVFDTTLQVKKAFFALVANGVRAAPLWESKKQSFVGMLTITDFINILHRYYKSPMVQIYELEEHKIETWRELYLQETFKPLVNISPDASLFDAVYSLIKNKIHRLPVIDPISGNALYILNHKRILKFLQLFMSDMPKPAFMKQNLDELGIGTYHNIAFIHPDTPIIKALNIFVERRISALPVVDESGKVVDIYSKFDVINLAAEKTYNNLDITVTQALQHRSQYFEGVVKCNKLEILETIVDRIVRAEVHRLVVVNEADSIVGIISLSDILQALILTPAGAKQKETETE

SEQ ID NO: 26 - RNA, 1707 nt, synthetic construct
  source 1..1707: mol_type = other RNA
atgggcagcgccgtgatggacaccaagaagaagaaggacgtgagcagcccaggcggcagcggcggaaagaagaacgccagccagaagagaagaagcctcagagtgcacatcccagaccttagcagcttcgccatgcctcttttagacggcgacctggagggctctggtaagcacagcagcagaaaggtggacagccctttcggccctggcagccctagcaagggcttcttcagcagaggccctcagcctagaccttcttcccctatgagcgcccctgtgcgacctaagactagtccaggatccccaaagaccgtgttccctttcagctaccaggagagccctcctagaagccctagaagaatgagcttcagcggcatcttcagaagcagcagcaaggaatccagtccaaacagcaaccctgccacaagcccgggcggcatcagattcttctccaggtcaagaaagacctccggcttgtcgtcatctccttcaacccctacccaggtgaccaagcagcacaccttccctctggagagctacaagcacgagccagaaagactggagaacagaatctacgccagctcctcaccacctgacaccggccagagattctgtccatcaagcttccagagccctaccagacctcctctggcctccccgacccactacgccccaagcaaggccgccgcactagctgcggcgttgggccctgccgaggccggcatgctggagaagctggagttcgaggacgaggccgtggaggacagcgagagcggcgtgtacatgagattcatgagaagccacaagtgctacgacatcgtgcctacatcatcaaagctggtggtgttcgacaccaccctgcaggtgaagaaggccttcttcgccctggtggccaacggcgtgagagccgcccctctgtgggagagcaagaagcagagcttcgtgggtatgcttaccatcaccgacttcatcaacatcctgcacagatactacaagagtccaatggtgcagatctacgagctggaggagcacaagatcgagacatggagagagctgtacctgcaggaaacattcaagcctctggtgaacatcagccctgatgccagcctgttcgacgccgtgtacagcctgatcaagaacaagatccacagactgcctgtgatcgaccctatctctggaaacgccctgtacatcctgaaccacaagagaatcctgaagttcctgcagctgttcatgagcgacatgcctaagcctgccttcatgaagcagaacctggatgaacttggcatcggcacctaccacaacatcgccttcatccacccagacactcctatcatcaaggccctgaacatcttcgtggagcgccgcatcagcgccctcccggtcgtggatgagagcggaaaggtcgttgacatctacagcaagttcgacgtgatcaatctcgccgccgagaagacctacaacaacctagatatcaccgtgacccaggccctgcagcacagaagccagtacttcgagggcgtggtgaagtgcaacaagcttgagatcctggaaacaatcgtggacagaattgtacgggcagaggtgcaccgtcttgtagttgtgaatgaggcagacagcatcgtcggcatcatcagccttagtgacatccttcaggcgttgatcctgacccctgccggcgccaagcagaaggaaactgaaaccgag

SEQ ID NO: 27 - protein, 288 aa, synthetic construct
MERPQPDSMPQDLSEALKEATKEVHTQAENAEFMRNFQKGQVTRDGFKLVMASLYHIYVALEEEIERNKESPVFAPVYFPEELHRKAALEQDLAFWYGPRWQEVIPYTPAMQRYVKRLHEVGRTEPELLVAHAYTRYLGDLSGGQVLKKIAQKALDLPSSGEGLAFFTFPNIASATKFKQLYRSRMNSLEMTPAVRQRVIEEAKTAFLLNIQLFEELQELLTHDTKDQSPSRAPGLRQRASNKVQDSAPVETPRGKPPLNTRSQAPLLRWVLTLSFLVATVAVGLYAM

SEQ ID NO: 28 - RNA, 864 nt, synthetic construct
  source 1..864: mol_type = other RNA
atggagcgtccgcaacccgacagcatgccccaggatttgtcagaggccttgaaggaggccaccaaggaggtgcacacccaggcagagaacgccgagttcatgaggaactttcagaagggccaggtgacccgagacggcttcaagctcgtgatggcctccctgtaccacatctatgtggccctggaggaggagattgagcgcaacaaggagagcccagtcttcgcccctgtctacttcccagaggaactgcaccgcaaggctgcactagaacaggacctggccttctggtacgggccccgctggcaggaggtcatcccctacacaccagccatgcagcgctatgtgaagcggctccacgaggtggggcgcacagagcccgagctgctggtggcccacgcctacacccgctacctgggtgacctgtctggtggacaagttctcaagaagattgcccagaaagccctggacctgcccagctctggcgagggactggcattcttcaccttccccaacattgccagtgctacaaagttcaagcagctctaccgctcccgcatgaactccctggagatgactcccgcagtgagacaaagggtgatagaagaggccaagactgcgttcctgctcaacatccagctctttgaggagttgcaggagctgttgacccatgacacaaaggaccagagcccctcacgggcaccagggcttcgccagcgggccagcaacaaagtgcaagattctgctccggtggagactcccagagggaagcctccactcaacacccggtcccaggctccgcttctccgatgggtccttacactcagctttctggtggcgacagttgctgtagggctttatgccatg

SEQ ID NO: 29 - protein, 532 aa, synthetic construct
MTSSKIEMPGEVKADPAALMASLHLLPSPTPNLEIKYTKIFINNEWQNSESGRVFPVYNPATGEQVCEVQEADKADIDKAVQAARLAFSLGSVWRRMDASERGRLLDKLADLVERDRAVLATMESLNGGKPFLQAFYVDLQGVIKTFRYYAGWADKIHGMTIPVDGDYFTFTRHEPIGVCGQIIPWNFPLLMFAWKIAPALCCGNTVVIKPAEQTPLSALYMGALIKEAGFPPGVINILPGYGPTAGAAIASHIGIDKIAFTGSTEVGKLIQEAAGRSNLKRVTLELGGKSPNIIFADADLDYAVEQAHQGVFFNQGQCCTAGSRIFVEESIYEEFVRRSVERAKRRVVGSPFDPTTEQGPQIDKKQYNKILELIQSGVAEGAKLECGGKGLGRKGFFIEPTVFSNVTDDMRIAKEEIFGPVQEILRFKTMDEVIERANNSDFGLVAAVFTNDINKALTVSSAMQAGTVWINCYNALNAQSPFGGFKMSGNGREMGEFGLREYSEVKTVTVKIPQKNSGKPIPNPLLGLDST

SEQ ID NO: 30 - RNA, 1596 nt, synthetic construct
  source 1..1596: mol_type = other RNA
atgaccagcagcaagatcgagatgcctggcgaggtgaaggccgaccctgccgccctgatggccagcctgcacctgctgcctagccctacccctaacctggagatcaagtacaccaagatcttcatcaacaacgagtggcagaacagcgagagcggcagagtgttccctgtgtacaaccctgccaccggcgagcaggtgtgcgaggtgcaggaggccgacaaggccgacatagacaaggctgtgcaggccgccagactggccttcagcctgggcagcgtgtggagaagaatggacgccagcgagagaggcagactgctggacaagctggccgacctggtggagagagacagagccgtgctggccaccatggagagcctgaacggcggcaagcctttcctgcaggccttctacgtggacctgcagggcgtgatcaagaccttcagatactacgccggctgggcagacaagatccacggcatgaccatccctgtggacggcgactacttcaccttcaccagacacgagcctatcggcgtgtgcggccagatcatcccttggaacttccctctgctgatgttcgcctggaagatcgcccctgccctgtgctgcggcaacaccgtggtgatcaagcctgccgagcagacccctctgagcgccctgtacatgggcgccctgatcaaggaggccggcttccctcctggcgtgattaacatcctgcctggctacggaccaactgccggagctgcgatcgccagccacatcggcatcgataagatcgccttcaccggcagcaccgaggtgggcaagctgatccaagaggctgccggcagaagcaacctgaagagagtgaccctggagctgggcggcaagagccctaacatcatcttcgccgacgctgatctggactacgccgtggagcaggcccaccagggcgtgttcttcaaccagggccagtgctgcacagccggcagcagaatcttcgtggaggagagcatctacgaggagttcgtgagaagaagcgttgaaagagccaagagaagagtggtgggcagccctttcgaccctaccaccgagcagggccctcagatagataagaagcagtacaacaagattctggaactgatccagagtggtgtggcagaaggcgccaagctggagtgtggcggcaagggattaggaagaaagggcttcttcatcgagcctaccgtgttcagcaacgtgaccgacgacatgagaatcgccaaggaggagatcttcggccctgtgcaggagatcctgagattcaagaccatggacgaggtgatcgagcgtgctaacaacagcgacttcggcctggtggccgccgtgttcaccaacgacatcaacaaggccctgaccgtgagcagcgccatgcaggccggcaccgtgtggatcaactgctacaacgccctgaacgcccagagtccattcggcggcttcaagatgagcggcaacggcagagagatgggcgagttcggcctgagagagtacagtgaggtgaagaccgtgaccgtgaagatccctcagaagaactccggaaagcctatccctaacccactcctgggcctggacagcacc

SEQ ID NO: 31 - protein, 714 aa, synthetic construct
MNSSSANITYASRKRRKPVQKTVKPIPAEGIKSNPSKRHRDRLNTELDRLASLLPFPQDVINKLDKLSVLRLSVSYLRAKSFFDVALKSSPTERNGGQDNCRAANFREGLNLQEGEFLLQALNGFVLVVTTDALVFYASSTIQDYLGFQQSDVIHQSVYELIHTEDRAEFQRQLHWALNPSQCTESGQGIEEATGLPQTVVCYNPDQIPPENSPLMERCFICRLRCLLDNSSGFLAMNFQGKLKYLHGQKKKGKDGSILPPQLALFAIATPLQPPSILEIRTKNFIFRTKHKLPLRTKNGTSGKDSATTSTLSKDSLNPSSLLAAMMQQDESIYLYPASSTSSTAPFENNFFNESMNECRNWQDNTAPMGNDTILKHEQIDQPQDVNSFAGGHPGLFQDSKNSDLYSIMKNLGIDFEDIRHMQNEKFFRNDFSGEVDFRDIDLTDEILTYVQDSLSKSPFIPSDYQQQQSLALNSSCMVQEHLHLEQQQQHHQKQVVVEPQQQLCQKMKHMQVNGMFENWNSNQFVPFNCPQQDPQQYNVFTDLHGISQEFPYKSEMDSMPYTQNFISCNQPVLPQHSKCTELDYPMGSFEPSPYPTTSSLEDFVTCLQLPENQKHGLNPQSAIITPQTCYAGAVSMYQCQPEPQHTHVGQMQYNPVLPGQQAFLNKFQNGVLNETYPAELNNINNTQTTTHLQPLHHPSEARPFPDLTSSGFL

SEQ ID NO: 32 - RNA, 2142 nt, synthetic construct
  source 1..2142: mol_type = other RNA
atgaacagcagcagcgccaacatcacctacgccagcagaaagagacgaaagccggtgcagaagaccgtgaagcctatcccggccgagggcatcaagagcaaccctagtaagagacaccgggatcgcttgaacaccgagctagaccggttagcctccctgctgcctttccctcaggacgtgatcaacaagctggataagctgagcgtcctgcgtcttagcgtgtcatacctgagagccaagagcttcttcgacgtggccttgaagtctagccccaccgagagaaacggcggccaggacaactgccgagctgcaaacttcagagaaggccttaacctgcaggagggtgagttcctgctgcaggctctgaacggcttcgtgctggtcgtcaccaccgacgcactggtgttctatgcatcgagcaccatccaggactacctgggcttccagcagagcgacgttattcaccagagcgtgtacgagctgatccacaccgaggacagagccgagttccagagacagctgcactgggcattgaatccttcacagtgcaccgagtcgggccaaggcatcgaggaggccaccggcctgcctcagaccgtggtctgctataatcccgaccagatccctcctgagaacagccctctgatggagagatgcttcatctgccgtctgagatgcctgctggacaactcaagcggcttcctcgccatgaacttccagggcaagctgaagtacctgcatggccagaagaagaagggcaaggacggcagcatcctgcctcctcagctggcgctgttcgcgattgccacccctctgcagcctcctagtatcctggagatcagaaccaagaatttcatcttccgcaccaagcacaagctgcctctgcgaaccaagaacggcaccagcggcaaggatagtgctacaacctctaccctgagcaaggactcacttaacccgtcttcactgctcgccgccatgatgcagcaggacgagagcatctatctgtaccctgcatcatccacatcatctactgcccctttcgagaacaacttcttcaatgagagtatgaacgagtgccgtaactggcaggataacacagccccgatggggaacgacaccatcctgaagcacgagcagatcgaccagcctcaggatgtgaacagcttcgcgggcggccaccctggcctgttccaggatagcaagaacagcgacctgtacagcatcatgaagaatctcggcatcgacttcgaggacatcagacacatgcagaatgagaagttcttccgaaacgacttctctggagaggtggatttcagagatatcgacctgaccgacgagatcctgacctacgtgcaagactccttgagcaagagtcctttcatacccagcgattaccagcagcaacagagtctggctttaaattcaagctgcatggtgcaggagcacctgcacctggaacaacagcaacaacaccaccagaaacaggtggtggtggagcctcaacagcagttatgtcagaagatgaagcatatgcaagtgaacggaatgttcgagaactggaatagcaatcagttcgtgccttttaattgtcctcaacaggatccgcaacagtacaatgtgttcaccgacctgcacggcatctcgcaggagttcccttacaagagcgagatggatagcatgccttatacccagaacttcatctcctgcaaccagccagtgctacctcagcacagcaagtgtacggaattagattaccccatgggcagttttgagccaagcccttaccctactacctcctcactcgaagacttcgtgacctgcctgcagctgccggagaaccagaagcacggcctcaaccctcagagcgccatcattaccccgcaaacttgctatgccggagccgtgagtatgtaccagtgccagcctgagccacagcacacccacgtgggccagatgcagtacaaccctgtgctgcccggccagcaggccttcctgaacaagttccagaacggcgtgctgaacgagacataccctgcggagctgaacaacataaacaacacacagaccaccacacacctccagcctctgcaccaccctagcgaggcaagacccttccctgatcttacaagtagtggattcctg

SEQ ID NO: 33 - protein, 589 aa, synthetic construct
MCPRAARAPATLLLALGAVLWPAAGAGGKPIPNPLLGLDSTWELTILHTNDVHSRLEQTSEDSSKCVNASRCMGGVARLFTKVQQIRRAEPNVLLLDAGDQYQGTIWFTVYKGAEVAHFMNALRYDAMALGNHEFDNGVEGLIEPLLKEAKFPILSANIKAKGPLASQISGLYLPYKVLPVGDEVVGIVGYTSKETPFLSNPGTNLVFEDEITALQPEVDKLKTLNVNKIIALGHSGFEMDKLIAQKVRGVDVVVGGHSNTFLYTGNPPSKEVPAGKYPFIVTSDDGRKVPVVQAYAFGKYLGYLKIEFDERGNVISSHGNPILLNSSIPEDPSIKADINKWRIKLDNYSTQELGKTIVYLDGSSQSCRFRECNMGNLICDAMINNNLRHTDEMFWNHVSMCILNGGGIRSPIDERNNGTITWENLAAVLPFGGTFDLVQLKGSTLKKAFEHSVHRYGQSTGEFLQVGGIHVVYDLSRKPGDRVVKLDVLCTKCRVPSYDPLKMDEVYKVILPNFLANGGDGFQMIKDELLRHDSGDQDINVVSTYISKMKVIYPAVEGRIKFSTGSHCHGSFSLIFLSLWAVIFVLYQ

SEQ ID NO: 34 - RNA, 1767 nt, synthetic construct
  source 1..1767: mol_type = other RNA
atgtgccctagagccgccagagccccagccaccttgctacttgccctcggcgccgtgctatggccagcagccggtgcgggaggcaagcctatccctaaccctttgctaggcctagacagcacctgggagctcaccatcttacacaccaacgacgtgcacagcagactggagcagaccagcgaggacagcagcaagtgcgtgaacgccagcagatgcatgggcggcgtggccagactgttcaccaaggtgcagcagatccgccgagccgagcctaacgtgctcctgctagacgccggcgaccagtaccagggcaccatctggttcaccgtgtacaagggcgccgaggtggcccacttcatgaacgccctgagatacgacgccatggcattgggaaaccacgagttcgacaacggcgtggagggcctgatcgagccactgcttaaggaggccaagttccctatcctgagcgccaacatcaaggccaagggccctctggccagccagatcagcggcctgtacctgccttacaaggtgctgcctgtgggcgacgaggtggtgggcatcgtgggctacaccagcaaggaaacccctttcctgagcaaccctggcaccaacctggtgttcgaggacgagatcaccgccctgcagcctgaggtggacaagctgaagaccctgaacgtgaacaagatcatcgcccttggccacagcggcttcgagatggataagttaattgctcagaaggtgagaggcgtggacgtagtggttggcggtcacagcaacaccttcctgtacaccggcaaccctccttcgaaggaggtgcctgccggcaagtaccctttcatcgtcacatctgacgacggcagaaaggtgccagtcgtgcaggcctacgccttcggaaagtacctgggctacctgaagatagagttcgatgagagaggcaacgtgatcagctctcatggcaatcctatactgctgaactctagtatccctgaggacccttcaattaaggccgacatcaacaagtggagaatcaagctggacaactacagcacccaggagctgggcaagaccatcgtgtacctggacggctcgtctcagagctgcagattcagagagtgcaacatgggcaacctgatctgcgacgctatgatcaacaacaacctgagacacaccgacgagatgttctggaaccacgtgagcatgtgcatcctgaacggcggcggcatcagaagccctatcgacgagcggaacaacggaactatcacttgggagaacctggcagctgtgcttcctttcggcggcaccttcgacctggtgcagctgaagggcagcaccctgaagaaggccttcgagcactcggtgcacagatacggccagagcaccggcgagttcctgcaggtgggcggtatacacgtggtgtacgacctgagcagaaagcctggcgacagagtggtgaagctagatgtcctctgcaccaagtgcagagtgcctagctacgaccctctgaagatggatgaggtttataaggtcatcctgcctaacttcctggccaacggtggtgacggcttccagatgatcaaggacgagctgttgaggcacgacagtggcgatcaagatataaacgtggtgagcacctacatcagcaagatgaaggtgatctaccctgcggtggagggacggattaagttctcaactggctctcattgccacggcagcttcagcctgatcttcctgtccttgtgggccgtgatcttcgtgctgtaccag

SEQ ID NO: 35 - protein, 525 aa, synthetic construct
MEDTKESNVKTFCSKNILAILGFSSIIAVIALLAVGLTQNKALPENVKYGIVLDAGSSHTSLYIYKWPAEKENDTGVVHQVEECRVKGPGISKFVQKVNEIGIYLTDCMERAREVIPRSQHQETPVYLGATAGMRLLRMESEELADRVLDVVERSLSNYPFDFQGARIITGQEEGAYGWITINYLLGKFSQKTRWFSIVPYETNNQETFGALDLGGASTQVTFVPQNQTIESPDNALQFRLYGKDYNVYTHSFLCYGKDQALWQKLAKDIQVASNEILRDPCFHPGYKKVVNVSDLYKTPCTKRFEMTLPFQQFEIQGIGNYQQCHQSILELFNTSYCPYSQCAFNGIFLPPLQGDFGAFSAFYFVMKFLNLTSEKVSQEKVTEMMKKFCAQPWEEIKTSYAGVKEKYLSEYCFSGTYILSLLLQGYHFTADSWEHIHFIGKIQGSDAGWTLGYMLNLTNMIPAEQPLSTPLSHSTYVFLMVLFSLVLFTVAIIGLLIFHKPSYFWKDMVGGKPIPNPLLGLDST

SEQ ID NO: 36 - RNA, 1575 nt, synthetic construct
  source 1..1575: mol_type = other RNA
atggaggacaccaaggagagcaacgtgaagaccttctgcagcaagaacatcctcgccatcctcggcttcagcagcatcatcgccgtgatcgccctcttggccgtgggccttacccagaacaaggcccttccagagaacgtgaagtacggcatcgtgctggacgccggcagcagccacaccagcctgtacatctacaagtggcctgccgagaaggagaacgacaccggcgtggtgcaccaggtggaggagtgcagagtgaagggccctggcatcagcaagttcgtgcagaaggtgaacgagatcggcatctacctgaccgactgcatggagagagccagagaggtgatccctagaagccagcaccaggagactcctgtgtacctgggcgccaccgccggcatgagactgctaagaatggagagcgaggagctggccgacagagtactcgacgtggtggagagaagcctgagcaactaccctttcgacttccagggcgccagaatcatcaccggccaggaggagggcgcctacggctggatcaccatcaactacctgctgggcaagttcagccagaagaccagatggttcagcattgtgccttacgagacgaacaatcaggaaacattcggcgccctggacttgggcggcgcttcaactcaggtgaccttcgtgcctcagaaccagaccatcgagagccctgacaacgccctgcagttcagactgtacggcaaggactacaacgtgtacacccacagcttcctgtgctatggaaaggatcaggccctgtggcagaagctggccaaggacatccaggtggccagcaatgaaattctgcgcgacccttgcttccaccctggctacaagaaggtggtgaacgtgagcgacctgtacaagaccccttgcaccaagagattcgagatgaccctgcctttccagcagttcgagatccagggcatcggaaactaccagcagtgccaccagagcatcctggagctgttcaacaccagctactgcccttacagccagtgcgccttcaacggcatcttcctgcctcctctgcagggcgacttcggagctttcagcgccttctacttcgtgatgaagttcctgaacctgaccagcgagaaggtgagccaggagaaggttaccgagatgatgaagaagttctgcgcccagccttgggaggagatcaagacgagctatgccggcgtcaaggagaagtacctgagcgagtactgcttcagcggcacctacatcctgagcctgctgttgcagggttaccacttcaccgccgacagctgggagcacatccacttcataggaaagattcagggtagcgatgccggatggaccctgggctacatgctgaatctaaccaacatgatcccagctgaacagcctctgagcaccccattgtcacacagcacctacgtgttcctgatggtgctgttcagcctggtcctattcaccgtggccatcatcggcctgctgatcttccacaagcctagctacttctggaaggacatggtgggcggcaagcctatccctaaccctctgttgggactggacagcacc

SEQ ID NO: 37 - protein, 346 aa, synthetic construct
MKWVTFLLLLFVSGSAFSRGVFRRESAKSRTIGIIGAPFSKGQPRGGVEEGPTVLRKAGLLEKLKEQECDVKDYGDLPFADIPNDSPFQIVKNPRSVGKASEQLAGKVAEVKKNGRISLVLGGDHSLAIGSISGHARVHPDLGVIWVDAHTDINTPLTTTSGNLHGQPVSFLLKELKGKIPDVPGFSWVTPCISAKDIVYIGLRDVDPGEHYILKTLGIKYFSMTEVDRLGIGKVMEETLSYLLGRKKRPIHLSFDVDGLDPSFTPATGTPVVGGLTYREGLYITEEIYKTGLLSGLDIMEVNPSLGKTPEEVTRTVNTAVAITLACFGLAREGNHKPIDYLNPPK

SEQ ID NO: 38 - RNA, 1038 nt, synthetic construct
  source 1..1038: mol_type = other RNA
atgaagtgggtgaccttcctgctgctgctgttcgtgagcggcagcgccttcagcagaggcgtgttcagaagagagagcgccaagagcagaaccatcggcatcatcggcgcccctttcagcaagggccagcctagaggcggcgtggaggagggccctaccgtgctgagaaaggccggcctgctggagaagctgaaggagcaggagtgcgacgtgaaggactacggcgacctgcctttcgccgacatccctaacgacagccctttccagatcgtgaagaaccctagaagcgtgggcaaggccagcgagcagctggccggcaaggtggccgaggtgaagaagaacggcagaatcagcctggtgctgggcggcgaccacagcctggccatcggcagcatcagcggccacgccagagtgcaccctgacctgggcgtgatctgggtggacgcccacaccgacatcaacacccctctgaccaccaccagcggcaacctgcacggccagcctgtgagcttcctgctgaaggagctgaagggcaagatccctgacgtgcctggcttcagctgggtgaccccttgcatcagcgccaaggacatcgtgtacatcggcctgagagacgtggaccctggcgagcactacatcctgaagaccctgggcatcaagtacttcagcatgaccgaggtggacagactgggcatcggcaaggtgatggaggagaccctgagctacctgctgggcagaaagaagagacctatccacctgagcttcgacgtggacggcctggaccctagcttcacccctgccaccggcacccctgtggtgggcggcctgacctacagagagggcctgtacatcaccgaggagatctacaagaccggcctgctgagcggcctggacatcatggaggtgaaccctagcctgggcaagacccctgaggaggtgaccagaaccgtgaacaccgccgtggccatcaccctggcctgcttcggcctggccagagagggcaaccacaagcctatcgactacctgaaccctcctaag

SEQ ID NO: 39 - protein, 322 aa, synthetic construct
MSAKSRTIGIIGAPFSKGQPRGGVEEGPTVLRKAGLLEKLKEQECDVKDYGDLPFADIPNDSPFQIVKNPRSVGKASEQLAGKVAEVKKNGRISLVLGGDHSLAIGSISGHARVHPDLGVIWVDAHTDINTPLTTTSGNLHGQPVSFLLKELKGKIPDVPGFSWVTPCISAKDIVYIGLRDVDPGEHYILKTLGIKYFSMTEVDRLGIGKVMEETLSYLLGRKKRPIHLSFDVDGLDPSFTPATGTPVVGGLTYREGLYITEEIYKTGLLSGLDIMEVNPSLGKTPEEVTRTVNTAVAITLACFGLAREGNHKPIDYLNPPK

SEQ ID NO: 40 - RNA, 966 nt, synthetic construct
  source 1..966: mol_type = other RNA
atgagcgccaagtccagaaccatagggattattggagctcctttctcaaagggacagccacgaggaggggtggaagaaggccctacagtattgagaaaggccggtttgcttgagaaacttaaagaacaagagtgtgacgtgaaggattacggggacctgccctttgctgacatccctaatgacagtccctttcaaattgtgaagaatccaaggtctgtgggcaaggcaagcgagcagctggctggcaaggtggcagaagtcaagaagaacggaagaatcagcctggtgctgggcggcgaccacagtttggcaattggaagcatctctggccatgccagggtccaccctgatcttggagtcatctgggtggatgctcacactgatatcaacactccactgacaaccacaagtggaaacttgcatggacaacctgtatctttcctcctgaaggaacttaagggaaagattcccgatgtgccaggattctcctgggtgactccctgtatatctgccaaggatattgtgtatattggcttgagagacgtggaccctggggaacactacattttgaagactctaggcattaaatacttttcaatgactgaagtggacagactaggaattggaaaggtcatggaagaaacactcagctatctactaggaagaaagaagaggccaattcatctaagttttgatgttgacggactggacccatctttcacaccagctactggcacaccagtcgtgggaggtctgacatacagagaaggactgtacatcacagaagaaatctacaagacagggctactctcaggattagatataatggaagtgaacccatcactcggaaagacaccagaagaagtaactcgaacagtgaacacagcagttgcaataaccttggcttgtttcggacttgctcgggagggtaatcacaagcctattgactaccttaacccacctaag

SEQ ID NO: 41 - protein, 354 aa, synthetic construct
MSLRGSLSRLLQTRVHSILKKSVHSVAVIGAPFSQGQKRKGVEHGPAAIREAGLMKRLSSLGCHLKDFGDLSFTPVPKDDLYNNLIVNPRSVGLANQELAEVVSRAVSDGYSCVTLGGDHSLAIGTISGHARHCPDLCVVWVDAHADINTPLTTSSGNLHGQPVSFLLRELQDKVPQLPGFSWIKPCISSASIVYIGLRDVDPPEHFILKNYDIQYFSMRDIDRLGIQKVMERTFDLLIGKRQRPIHLSFDIDAFDPTLAPATGTPVVGGLTYREGMYIAEEIHNTGLLSALDLVEVNPQLATSEEEAKTTANLAVDVIASSFGQTREGGHIVYDQLPTPSSPDESENQARVRI

SEQ ID NO: 42 - RNA, 1062 nt, synthetic construct
  source 1..1062: mol_type = other RNA
atgtccctaaggggcagcctctcgcgtctcctccagacgcgagtgcattccatcctaaagaaatccgtccactccgtggcagtgataggagccccgttctcacaagggcagaagcgaaagggagtggagcacggtcccgcggccataagagaagctggcttgatgaagaggctctccagtttgggctgccacctaaaggactttggagatttgagttttactccagtccccaaagatgatctctacaacaacctgatagtgaatccacgctcagtgggtcttgccaaccaggaactggctgaggtggttagcagagctgtgtcagatggctactcttgcgtcacactgggaggtgatcacagcctggcaatcggtaccattagtggccatgcccgacactgcccagacctttgtgttgtctgggttgatgcccatgctgacatcaacacaccccttaccacttcatcaggaaatctccatggacagccagtttcatttctcctcagagaactacaggataaggtaccacaactcccaggattttcctggatcaaaccttgtatctcttctgcaagtattgtgtatattggtctgagagacgtggaccctcctgaacacttcatattgaagaactatgatatccagtatttctccatgagagatattgatcgacttggtatccagaaggtcatggaacgaacatttgatctgctgattggcaagagacaaagaccaatccatctctctttcgatatcgacgcatttgaccctacactggctccagccacaggaactcctgttgtcggcggactaacctatcgagaaggcatgtacatcgctgaggaaatacacaatacagggttgctatcagcactggatcttgttgaagtcaatcctcagttggccacctcagaggaagaggcgaagactacagctaacctggcagtagatgtgattgcttcaagctttggtcagacaagagaaggagggcatattgtctatgaccaacttcctactcccagttcaccagatgaatcagagaatcaagcacgtgtgagaatt

SEQ ID NO: 43-49 - skipped (7 entries)

SEQ ID NO: 50 - RNA, 75 nt, synthetic construct
  source 1..75: mol_type = other RNA
  misc_difference 6: note = uracil or N1-methylpseudouracil
  misc_difference 14: note = uracil or N1-methylpseudouracil
  misc_difference 15: note = uracil or N1-methylpseudouracil
  misc_difference 16: note = uracil or N1-methylpseudouracil
  misc_difference 19: note = uracil or N1-methylpseudouracil
  misc_difference 21: note = uracil or N1-methylpseudouracil
  misc_difference 22: note = uracil or N1-methylpseudouracil
  misc_difference 27: note = uracil or N1-methylpseudouracil
  misc_difference 28: note = uracil or N1-methylpseudouracil
  misc_difference 32: note = uracil or N1-methylpseudouracil
  misc_difference 33: note = uracil or N1-methylpseudouracil
  misc_difference 34: note = uracil or N1-methylpseudouracil
  misc_difference 36: note = uracil or N1-methylpseudouracil
  misc_difference 37: note = uracil or N1-methylpseudouracil
  misc_difference 38: note = uracil or N1-methylpseudouracil
  misc_difference 39: note = uracil or N1-methylpseudouracil
  misc_difference 42: note = uracil or N1-methylpseudouracil
  misc_difference 43: note = uracil or N1-methylpseudouracil
  misc_difference 44: note = uracil or N1-methylpseudouracil
  misc_difference 45: note = uracil or N1-methylpseudouracil
  misc_difference 47: note = uracil or N1-methylpseudouracil
  misc_difference 54: note = uracil or N1-methylpseudouracil
  misc_difference 62: note = uracil or N1-methylpseudouracil
  misc_difference 63: note = uracil or N1-methylpseudouracil
  misc_difference 64: note = uracil or N1-methylpseudouracil
  misc_difference 65: note = uracil or N1-methylpseudouracil
  misc_difference 66: note = uracil or N1-methylpseudouracil
  misc_difference 68: note = uracil or N1-methylpseudouracil
  misc_difference 69: note = uracil or N1-methylpseudouracil
  misc_difference 71: note = uracil or N1-methylpseudouracil
ggaaatcgcaaaatttgctcttcgcgttagatttcttttagttttctcgcaactagcaagctttttgttctcgcc

SEQ ID NO: 51 - RNA, 203 nt, synthetic construct
  source 1..203: mol_type = other RNA
ggaaatccccacaaccgcctcatatccaggctcaagaatagagctcagtgttttgttgtttaatcattccgacgtgttttgcgatattcgcgcaaagcagccagtcgcgcgcttgcttttaagtagagttgtttttccacccgtttgccaggcatctttaatttaacatatttttatttttcaggctaacctacgccgccacc

SEQ ID NO: 52 - RNA, 76 nt, synthetic construct
  source 1..76: mol_type = other RNA
ggaaataagagagaaaagaagagtaagaagaaatataagatctccctgagcttcagggagccccggcgccgccacc

SEQ ID NO: 53 - RNA, 89 nt, synthetic construct
  source 1..89: mol_type = other RNA
ggaaaccccccacccccgtaagagagaaaagaagagtaagaagaaatataagatctccctgagcttcagggagccccggcgccgccacc

SEQ ID NO: 54 - RNA, 59 nt, synthetic construct
  source 1..59: mol_type = other RNA
ggagaacttccgcttccgttggcgcaagcgctttcattttttctgctaccgtgactaag

SEQ ID NO: 55 - RNA, 46 nt, synthetic construct
  source 1..46: mol_type = other RNA
  misc_difference 6: note = uracil or N1-methylpseudouracil
  misc_difference 24: note = uracil or N1-methylpseudouracil
  misc_difference 34: note = uracil or N1-methylpseudouracil
  misc_difference 36: note = uracil or N1-methylpseudouracil
ggaaataagagagaaaagaagagtaagaagaaatataagagccacc

SEQ ID NO: 56 - RNA, 56 nt, synthetic construct
  source 1..56: mol_type = other RNA
  misc_difference 6: note = uracil or N1-methylpseudouracil
  misc_difference 24: note = uracil or N1-methylpseudouracil
  misc_difference 34: note = uracil or N1-methylpseudouracil
  misc_difference 36: note = uracil or N1-methylpseudouracil
ggaaataagagagaaaagaagagtaagaagaaatataagaccccggcgccgccacc

SEQ ID NO: 57 - RNA, 81 nt, synthetic construct
  source 1..81: mol_type = other RNA
ggaaatcgcaaaatttgctcttcgcgttagatttcttttagttttctcgcaactagcaagctttttgttctcgccgccgcc

SEQ ID NO: 58 - RNA, 81 nt, synthetic construct
  source 1..81: mol_type = other RNA
ggaaatcgcaaaattttcttttcgcgttagatttcttttagttttctttcaactagcaagctttttgttctcgccgccgcc

SEQ ID NO: 59 - RNA, 83 nt, synthetic construct
  source 1..83: mol_type = other RNA
  misc_difference 14..18: note = This region may encompass 0-5 positions
  misc_difference 19: note = This region may be present or absent
  misc_difference 22: note = This region may be present or absent
  misc_difference 23..27: note = This region may encompass 0-5 positions
  misc_difference 81..83: note = This region may be present or absent
ggaaatcgcaaaatttttgctctttttcgcgttagatttcttttagttttctykcaactagcaagctttttgttctcgccrcc

SEQ ID NO: 60 - RNA, 79 nt, synthetic construct
  source 1..79: mol_type = other RNA
ggaaaattttagcctggaacgttagataactgtcctgttgtctttatatacttggtccccaagtagtttgtcttccaaa

SEQ ID NO: 61 - RNA, 79 nt, synthetic construct
  source 1..79: mol_type = other RNA
ggaaactttatttagtgttactttattttctgtttatttgtgtttcttcagtgggtttgttctaatttccttggccgcc

SEQ ID NO: 62 - RNA, 79 nt, synthetic construct
  source 1..79: mol_type = other RNA
ggaaaatctgtattaggttggcgtgttctttggtcggttgttagtattgttgttgattcgtttgtggtcggttgccgcc

SEQ ID NO: 63 - RNA, 79 nt, synthetic construct
  source 1..79: mol_type = other RNA
ggaaaattattaacatcttggtattctcgataaccattcgttggattttattgtattcgtagtttgggttcctgccgcc

SEQ ID NO: 64 - RNA, 79 nt, synthetic construct
  source 1..79: mol_type = other RNA
ggaaattattattatttctagctacaatttatcattgtattattttagctattcatcattatttacttggtgatcaaca

SEQ ID NO: 65 - RNA, 79 nt, synthetic construct
  source 1..79: mol_type = other RNA
ggaaataggttgttaaccaagttcaagcctaataagcttggattctggtgacttgcttcaccgttggcgggcaccgatc

SEQ ID NO: 66 - RNA, 74 nt, synthetic construct
  source 1..74: mol_type = other RNA
ggaaatcgtagagagtcgtacttagtacatatcgactatcggtggacaccatcaagattataaaccaggccaga

SEQ ID NO: 67 - RNA, 79 nt, synthetic construct
  source 1..79: mol_type = other RNA
ggaaacccgcccaagcgaccccaacatatcagcagttgcccaatcccaactcccaacacaatccccaagcaacgccgcc

SEQ ID NO: 68 - RNA, 79 nt, synthetic construct
  source 1..79: mol_type = other RNA
ggaaagcgattgaaggcgtcttttcaactactcgattaaggttgggtatcgtcgtgggacttggaaatttgttgtttcc

SEQ ID NO: 69 - RNA, 79 nt, synthetic construct
  source 1..79: mol_type = other RNA
ggaaactaatcgaaataaaagagccccgtactcttttatttctattaggttaggagccttagcatttgtatcttaggta

SEQ ID NO: 70 - RNA, 79 nt, synthetic construct
  source 1..79: mol_type = other RNA
ggaaatgtgatttccagcaacttcttttgaatatattgaattcctaattcaaagcgaacaaatctacaagccatatacc

SEQ ID NO: 71 - RNA, 74 nt, synthetic construct
  source 1..74: mol_type = other RNA
ggaaatcgtagagagtcgtacttacgtggtcgccattgcatagcgcgcgaaagcaacaggaacaagaacgcgcc

SEQ ID NO: 72 - RNA, 74 nt, synthetic construct
  source 1..74: mol_type = other RNA
ggaaatcgtagagagtcgtacttagaataaacagagtcgggtcgacttgtctctgatactacgacgtcacaatc

SEQ ID NO: 73 - RNA, 79 nt, synthetic construct
  source 1..79: mol_type = other RNA
ggaaaatttgccttcggagttgcgtatcctgaactgcccagcctcctgatatacaactgttccgcttattcgggccgcc

SEQ ID NO: 74 - RNA, 79 nt, synthetic construct
  source 1..79: mol_type = other RNA
ggaaatctgagcaggaatcctttgtgcattgaagactttagattcctctctgcggtagacgtgcacttataagtatttg

SEQ ID NO: 75 - RNA, 79 nt, synthetic construct
  source 1..79: mol_type = other RNA
ggaaagcgattgaaggcgtcttttcaactactcgattaaggttgggtatcgtcgtgggacttggaaatttgttgccacc

SEQ ID NO: 76 - RNA, 104 nt, synthetic construct
  source 1..104: mol_type = other RNA
ggaaatttttttttgatattataagagtttttttttgatattaagaaaatttttttttgatattagaagagtaagaagaaatataagaccccggcgccgccacc

SEQ ID NO: 77 - RNA, 57 nt, synthetic construct
  source 1..57: mol_type = other RNA
ggaaataagagagaaaagaagagtaagaagaaatataagagccaaaaaaaaaaaacc

SEQ ID NO: 78 - RNA, 76 nt, synthetic construct
  source 1..76: mol_type = other RNA
ggaaatctccctgagcttcagggagtaagagagaaaagaagagtaagaagaaatataagaccccggcgccgccacc

SEQ ID NO: 79 - skipped

SEQ ID NO: 80 - RNA, 42 nt, synthetic construct
  source 1..42: mol_type = other RNA
gggagacaagcttggcattccggtactgttggtaaagccacc

SEQ ID NO: 81 - RNA, 47 nt, synthetic construct
  source 1..47: mol_type = other RNA
gggaattaacagagaaaagaagagtaagaagaaatataagagccacc

SEQ ID NO: 82 - RNA, 47 nt, synthetic construct
  source 1..47: mol_type = other RNA
gggaaattagacagaaaagaagagtaagaagaaatataagagccacc

SEQ ID NO: 83 - RNA, 47 nt, synthetic construct
  source 1..47: mol_type = other RNA
gggaaataagagagtaaagaacagtaagaagaaatataagagccacc

SEQ ID NO: 84 - RNA, 47 nt, synthetic construct
  source 1..47: mol_type = other RNA
gggaaaaaagagagaaaagaagactaagaagaaatataagagccacc

SEQ ID NO: 85 - RNA, 47 nt, synthetic construct
  source 1..47: mol_type = other RNA
gggaaataagagagaaaagaagagtaagaagatatataagagccacc

SEQ ID NO: 86 - RNA, 47 nt, synthetic construct
  source 1..47: mol_type = other RNA
gggaaataagagacaaaacaagagtaagaagaaatataagagccacc

SEQ ID NO: 87 - RNA, 47 nt, synthetic construct
  source 1..47: mol_type = other RNA
gggaaattagagagtaaagaacagtaagtagaattaaaagagccacc

SEQ ID NO: 88 - RNA, 47 nt, synthetic construct
  source 1..47: mol_type = other RNA
gggaaataagagagaatagaagagtaagaagaaatataagagccacc

SEQ ID NO: 89 - RNA, 47 nt, synthetic construct
  source 1..47: mol_type = other RNA
gggaaataagagagaaaagaagagtaagaagaaaattaagagccacc

SEQ ID NO: 90 - RNA, 47 nt, synthetic construct
  source 1..47: mol_type = other RNA
gggaaataagagagaaaagaagagtaagaagaaatttaagagccacc

SEQ ID NO: 91 - RNA, 92 nt, synthetic construct
  source 1..92: mol_type = other RNA
tcaagcttttggaccctcgtacagaagctaatacgactcactatagggaaataagagagaaaagaagagtaagaagaaatataagagccacc

SEQ ID NO: 92-99 - skipped (8 entries)

SEQ ID NO: 100 - RNA, 119 nt, synthetic construct
  source 1..119: mol_type = other RNA
  misc_difference 1: note = uracil or N1-methylpseudouracil
  misc_difference 4: note = uracil or N1-methylpseudouracil
  misc_difference 7: note = uracil or N1-methylpseudouracil
  misc_difference 12: note = uracil or N1-methylpseudouracil
  misc_difference 19: note = uracil or N1-methylpseudouracil
  misc_difference 22: note = uracil or N1-methylpseudouracil
  misc_difference 31: note = uracil or N1-methylpseudouracil
  misc_difference 33: note = uracil or N1-methylpseudouracil
  misc_difference 35: note = uracil or N1-methylpseudouracil
  misc_difference 40: note = uracil or N1-methylpseudouracil
  misc_difference 42: note = uracil or N1-methylpseudouracil
  misc_difference 43: note = uracil or N1-methylpseudouracil
  misc_difference 51: note = uracil or N1-methylpseudouracil
  misc_difference 61: note = uracil or N1-methylpseudouracil
  misc_difference 64: note = uracil or N1-methylpseudouracil
  misc_difference 65: note = uracil or N1-methylpseudouracil
  misc_difference 68: note = uracil or N1-methylpseudouracil
  misc_difference 70: note = uracil or N1-methylpseudouracil
  misc_difference 78: note = uracil or N1-methylpseudouracil
  misc_difference 79: note = uracil or N1-methylpseudouracil
  misc_difference 82: note = uracil or N1-methylpseudouracil
  misc_difference 90: note = uracil or N1-methylpseudouracil
  misc_difference 93: note = uracil or N1-methylpseudouracil
  misc_difference 95: note = uracil or N1-methylpseudouracil
  misc_difference 96: note = uracil or N1-methylpseudouracil
  misc_difference 97: note = uracil or N1-methylpseudouracil
  misc_difference 101: note = uracil or N1-methylpseudouracil
  misc_difference 106: note = uracil or N1-methylpseudouracil
  misc_difference 108: note = uracil or N1-methylpseudouracil
  misc_difference 112: note = uracil or N1-methylpseudouracil
taatagtaagctggagcctcctgagagacctgtgtgaactattgagaagatcggaacagctccttactctgaggaagttggtacccccgtggtctttgaataaagtctgagtgggcggc

SEQ ID NO: 101 - RNA, 119 nt, synthetic construct
  source 1..119: mol_type = other RNA
taatagtaagctggagcctcactctcctctccatcccgtatccaggctgtgaatttttcaaggaatataaagatcgggatgtacccccgtggtctttgaataaagtctgagtgggcggc

SEQ ID NO: 102 - RNA, 119 nt, synthetic construct
  source 1..119: mol_type = other RNA
tgatagtaagctggagcctctagtgacggcaacagggcttggtttttccttgttgtgaaatcgacatctctgaagacagggtacccccgtggtctttgaataaagtctgagtgggcggc

SEQ ID NO: 103 - RNA, 119 nt, synthetic construct
  source 1..119: mol_type = other RNA
tgatagtaagctggagcctccttccatctagtcacaaagactccttcgtccccagttgccgtctaggattgggcctcccagtacccccgtggtctttgaataaagtctgagtgggcggc

SEQ ID NO: 104 - RNA, 119 nt, synthetic construct
  source 1..119: mol_type = other RNA
tgatagtaagctggagcctcccataacatgacatatctggattttgtgcttagaaccttaaattggaagcattcttaattgtacccccgtggtctttgaataaagtctgagtgggcggc

SEQ ID NO: 105 - RNA, 119 nt, synthetic construct
  source 1..119: mol_type = other RNA
taatagtaagctggagcctccggaaaactaaaatagagatatttcaagattttataattttcaaagacctttgaaatattgtacccccgtggtctttgaataaagtctgagtgggcggc

SEQ ID NO: 106 - RNA, 119 nt, synthetic construct
  source 1..119: mol_type = other RNA
taatagtaagctggagcctctacacattgcttctagttggcagaaataattgattaaaagaccagaaactgtgataactggtacccccgtggtctttaaataaagtctaagtgggcggc

SEQ ID NO: 107 - RNA, 119 nt, synthetic construct
  source 1..119: mol_type = other RNA
  misc_difference 1: note = uracil or N1-methylpseudouracil
  misc_difference 4: note = uracil or N1-methylpseudouracil
  misc_difference 7: note = uracil or N1-methylpseudouracil
  misc_difference 12: note = uracil or N1-methylpseudouracil
  misc_difference 19: note = uracil or N1-methylpseudouracil
  misc_difference 23: note = uracil or N1-methylpseudouracil
  misc_difference 29: note = uracil or N1-methylpseudouracil
  misc_difference 32: note = uracil or N1-methylpseudouracil
  misc_difference 33: note = uracil or N1-methylpseudouracil
  misc_difference 35: note = uracil or N1-methylpseudouracil
  misc_difference 36: note = uracil or N1-methylpseudouracil
  misc_difference 42: note = uracil or N1-methylpseudouracil
  misc_difference 43: note = uracil or N1-methylpseudouracil
  misc_difference 49: note = uracil or N1-methylpseudouracil
  misc_difference 62: note = uracil or N1-methylpseudouracil
  misc_difference 65: note = uracil or N1-methylpseudouracil
  misc_difference 70: note = uracil or N1-methylpseudouracil
  misc_difference 71: note = uracil or N1-methylpseudouracil
  misc_difference 74: note = uracil or N1-methylpseudouracil
  misc_difference 82: note = uracil or N1-methylpseudouracil
  misc_difference 90: note = uracil or N1-methylpseudouracil
  misc_difference 93: note = uracil or N1-methylpseudouracil
  misc_difference 95: note = uracil or N1-methylpseudouracil
  misc_difference 96: note = uracil or N1-methylpseudouracil
  misc_difference 97: note = uracil or N1-methylpseudouracil
  misc_difference 101: note = uracil or N1-methylpseudouracil
  misc_difference 106: note = uracil or N1-methylpseudouracil
  misc_difference 108: note = uracil or N1-methylpseudouracil
  misc_difference 112: note = uracil or N1-methylpseudouracil
tgataataggctggagcctcggtggccatgcttcttgccccttgggcctccccccagcccctcctccccttcctgcacccgtacccccgtggtctttgaataaagtctgagtgggcggc

SEQ ID NO: 108 - RNA, 119 nt, synthetic construct
  source 1..119: mol_type = other RNA
  misc_difference 1: note = uracil or N1-methylpseudouracil
  misc_difference 4: note = uracil or N1-methylpseudouracil
  misc_difference 7: note = uracil or N1-methylpseudouracil
  misc_difference 12: note = uracil or N1-methylpseudouracil
  misc_difference 19: note = uracil or N1-methylpseudouracil
  misc_difference 23: note = uracil or N1-methylpseudouracil
  misc_difference 28: note = uracil or N1-methylpseudouracil
  misc_difference 32: note = uracil or N1-methylpseudouracil
  misc_difference 33: note = uracil or N1-methylpseudouracil
  misc_difference 35: note = uracil or N1-methylpseudouracil
  misc_difference 36: note = uracil or N1-methylpseudouracil
  misc_difference 42: note = uracil or N1-methylpseudouracil
  misc_difference 43: note = uracil or N1-methylpseudouracil
  misc_difference 49: note = uracil or N1-methylpseudouracil
  misc_difference 62: note = uracil or N1-methylpseudouracil
  misc_difference 65: note = uracil or N1-methylpseudouracil
  misc_difference 70: note = uracil or N1-methylpseudouracil
  misc_difference 71: note = uracil or N1-methylpseudouracil
  misc_difference 74: note = uracil or N1-methylpseudouracil
  misc_difference 82: note = uracil or N1-methylpseudouracil
  misc_difference 90: note = uracil or N1-methylpseudouracil
  misc_difference 93: note = uracil or N1-methylpseudouracil
  misc_difference 95: note = uracil or N1-methylpseudouracil
  misc_difference 96: note = uracil or N1-methylpseudouracil
  misc_difference 97: note = uracil or N1-methylpseudouracil
  misc_difference 101: note = uracil or N1-methylpseudouracil
  misc_difference 106: note = uracil or N1-methylpseudouracil
  misc_difference 108: note = uracil or N1-methylpseudouracil
  misc_difference 112: note = uracil or N1-methylpseudouracil
tgataataggctggagcctcggtggcctagcttcttgccccttgggcctccccccagcccctcctccccttcctgcacccgtacccccgtggtctttgaataaagtctgagtgggcggc

SEQ ID NO: 109 - RNA, 141 nt, synthetic construct
  source 1..141: mol_type = other RNA
tgataataggctggagcctcggtggccatgcttcttgccccttgggcctccccccagcccctcctccccttcctgcacccgtaccccccaaacaccattgtcacactccagtggtctttgaataaagtctgagtgggcggc

SEQ ID NO: 110 - RNA, 141 nt, synthetic construct
  source 1..141: mol_type = other RNA
tgataataggctggagcctcggtggcctagcttcttgccccttgggcctccccccagcccctcctccccttcctgcacccgtaccccccaaacaccattgtcacactccagtggtctttgaataaagtctgagtgggcggc

SEQ ID NO: 111 - RNA, 142 nt, synthetic construct
  source 1..142: mol_type = other RNA
tgataataggctggagcctcggtggcctagcttcttgccccttgggcctccccccagcccctcctccccttcctgcacccgtaccccctccataaagtaggaaacactacagtggtctttgaataaagtctgagtgggcggc

SEQ ID NO: 112 - RNA, 141 nt, synthetic construct
  source 1..141: mol_type = other RNA
tgataataggctggagcctcggtggcctagcttcttgccccttgggcctccccccagcccctcctccccttcctgcacccgtaccccccgcattattactcacggtacgagtggtctttgaataaagtctgagtgggcggc

SEQ ID NO: 113 - RNA, 164 nt, synthetic construct
  source 1..164: mol_type = other RNA
tgataatagtccataaagtaggaaacactacagctggagcctcggtggccatgcttcttgccccttgggcctccccccagcccctcctccccttcctgcacccgtaccccccgcattattactcacggtacgagtggtctttgaataaagtctgagtgggcggc

SEQ ID NO: 114 - RNA, 188 nt, synthetic construct
  source 1..188: mol_type = other RNA
tgataatagtccataaagtaggaaacactacagctggagcctcggtggcctagcttcttgccccttgggcctccataaagtaggaaacactacatccccccagcccctcctccccttcctgcacccgtaccccctccataaagtaggaaacactacagtggtctttgaataaagtctgagtgggcggc

SEQ ID NO: 115 - RNA, 60 nt, synthetic construct
  source 1..60: mol_type = other RNA
ctgagagacctgtgtgaactattgagaagatcggaacagctccttactctgaggaagttg

SEQ ID NO: 116 - RNA, 119 nt, synthetic construct
  source 1..119: mol_type = other RNA
tgataataggctggagcctctcacacacctctgccccttgggcctcccactcccatggctctgggcggtccagaaggagcgtacccccgtggtctttgaataaagtctgagtgggcggc

SEQ ID NO: 117 - RNA, 109 nt, synthetic construct
  source 1..109: mol_type = other RNA
tgataataggctggagcctccaccgcgttatccgttcctcgtaggctggtcctggggaacgggtcggcgggtacccccgtggtctttgaataaagtctgagtgggcggc

SEQ ID NO: 118 - RNA, 257 nt, synthetic construct
  source 1..257: mol_type = other RNA
tgataataggctggagcctctgcccggcaacggccaggtctgtgccaagtgtttgctgacgcaacccccactggctggggcttggtcatgggccatcagcgcgtgcgtggaaccttttcggctcctctgccgatccatactgcggaactcctagccgcttgttttgctcgcagcaggtctggagcaaacattatcgggactgataactctgttgtcctgtacccccgtggtctttgaataaagtctgagtgggcggc

SEQ ID NO: 119 - RNA, 219 nt, synthetic construct
  source 1..219: mol_type = other RNA
tgataataggctggagcctcggtggcctagcttcttgccccttgggcctccccccagcccctcctccccttcctgcacccgtaccctttttttttttttttttttcttcttttcttttttttcttttttttttttctttctttttttctttttttttcttttcttttttcttttttttttttttttccgtggtctttgaataaagtctgagtgggcggc

SEQ ID NO: 120 - RNA, 219 nt, synthetic construct
  source 1..219: mol_type = other RNA
tgataataggctggagcctcggtggcctagcttcttgccccttgggcctccccccagcccctcctccccttcctgcacccgtacccttttttttttttttttttttttttttttttttttttttttttttttttttttttttttttttttttttttttttttttttttttttttttttttttttttccgtggtctttgaataaagtctgagtgggcggc

SEQ ID NO: 121-132 - skipped (12 entries)

SEQ ID NO: 133 - RNA, 185 nt, synthetic construct
  source 1..185: mol_type = other RNA
taagtctccataaagtaggaaacactacagctggagcctcggtggcctagcttcttgccccttgggcctccataaagtaggaaacactacatccccccagcccctcctccccttcctgcacccgtaccccctccataaagtaggaaacactacagtggtctttgaataaagtctgagtgggcggc

SEQ ID NO: 134 - RNA, 139 nt, synthetic construct
  source 1..139: mol_type = other RNA
taaagcgctggagcctcggtggcctagcttcttgccccttgggcctccccccagcccctcctccccttcctgcacccgtaccccctccataaagtaggaaacactacagtggtctttgaataaagtctgagtgggcggc

SEQ ID NO: 135 - RNA, 194 nt, synthetic construct
  source 1..194: mol_type = other RNA
taaagctccccggggtccataaagtaggaaacactacagctggagcctcctgagagacctgtgtgaactattgagaagatcggaacagctccttactctgaggaagttgtccataaagtaggaaacactacagtaccccctccataaagtaggaaacactacagtggtctttgaataaagtctgagtgggcggc

SEQ ID NO: 136 - RNA, 241 nt, synthetic construct
  source 1..241: mol_type = other RNA
taatagtaaacctcactcacggccacattgagtgccaggctccgggctggtttatagtagtgtagagcattgcagcacttagactggggtgctgtagtctttattgtagtctttccacatacctgataattcttagataatttcttattttaattccataaagtaggaaacactacataaatctccataaagtaggaaacactacatattcttccataaagtaggaaacactacataggct

SEQ ID NO: 137 - RNA, 94 nt, synthetic construct
  source 1..94: mol_type = other RNA
gcctccaccgcgttatccgttcctcgtaggctggtcctggggaacgggtcggcgggtacccccgtggtctttgaataaagtctgagtgggcggc

SEQ ID NO: 138 - RNA, 254 nt, synthetic construct
  source 1..254: mol_type = other RNA
caccgcgttatccgttcctcgtaggctggtcctggggaacgggtcggcgggcctcggtggcctagcttcttgccccttgggcccaccgcgttatccgttcctcgtaggctggtcctggggaacgggtcggcggtccccccagcccctcctccccttcctgcacccgtaccccccaccgcgttatccgttcctcgtaggctggtcctggggaacgggtcggcgggtggtctttgaataaagtctgagtgggcggc

SEQ ID NO: 139 - RNA, 119 nt, synthetic construct
  source 1..119: mol_type = other RNA
taaagctccccgggggcctcggtggcctagcttcttgccccttgggcctccccccagcccctcctccccttcctgcacccgtacccccgtggtctttgaataaagtctgagtgggcggc

SEQ ID NO: 140 - RNA, 119 nt, synthetic construct
  source 1..119: mol_type = other RNA
  misc_difference 1: note = uracil or N1-methylpseudouracil
  misc_difference 5: note = uracil or N1-methylpseudouracil
  misc_difference 7: note = uracil or N1-methylpseudouracil
  misc_difference 12: note = uracil or N1-methylpseudouracil
  misc_difference 19: note = uracil or N1-methylpseudouracil
  misc_difference 23: note = uracil or N1-methylpseudouracil
  misc_difference 28: note = uracil or N1-methylpseudouracil
  misc_difference 32: note = uracil or N1-methylpseudouracil
  misc_difference 33: note = uracil or N1-methylpseudouracil
  misc_difference 35: note = uracil or N1-methylpseudouracil
  misc_difference 36: note = uracil or N1-methylpseudouracil
  misc_difference 42: note = uracil or N1-methylpseudouracil
  misc_difference 43: note = uracil or N1-methylpseudouracil
  misc_difference 49: note = uracil or N1-methylpseudouracil
  misc_difference 62: note = uracil or N1-methylpseudouracil
  misc_difference 65: note = uracil or N1-methylpseudouracil
  misc_difference 70: note = uracil or N1-methylpseudouracil
  misc_difference 71: note = uracil or N1-methylpseudouracil
  misc_difference 74: note = uracil or N1-methylpseudouracil
  misc_difference 82: note = uracil or N1-methylpseudouracil
  misc_difference 90: note = uracil or N1-methylpseudouracil
  misc_difference 93: note = uracil or N1-methylpseudouracil
  misc_difference 95: note = uracil or N1-methylpseudouracil
  misc_difference 96: note = uracil or N1-methylpseudouracil
  misc_difference 97: note = uracil or N1-methylpseudouracil
  misc_difference 101: note = uracil or N1-methylpseudouracil
  misc_difference 106: note = uracil or N1-methylpseudouracil
  misc_difference 108: note = uracil or N1-methylpseudouracil
  misc_difference 112: note = uracil or N1-methylpseudouracil
taagtctccgctggagcctcggtggcctagcttcttgccccttgggcctccccccagcccctcctccccttcctgcacccgtacccccgtggtctttgaataaagtctgagtgggcggc

SEQ ID NO: 141 - RNA, 119 nt, synthetic construct
  source 1..119: mol_type = other RNA
  misc_difference 1: note = uracil or N1-methylpseudouracil
  misc_difference 9: note = uracil or N1-methylpseudouracil
  misc_difference 19: note = uracil or N1-methylpseudouracil
  misc_difference 23: note = uracil or N1-methylpseudouracil
  misc_difference 28: note = uracil or N1-methylpseudouracil
  misc_difference 32: note = uracil or N1-methylpseudouracil
  misc_difference 33: note = uracil or N1-methylpseudouracil
  misc_difference 35: note = uracil or N1-methylpseudouracil
  misc_difference 36: note = uracil or N1-methylpseudouracil
  misc_difference 42: note = uracil or N1-methylpseudouracil
  misc_difference 43: note = uracil or N1-methylpseudouracil
  misc_difference 49: note = uracil or N1-methylpseudouracil
  misc_difference 62: note = uracil or N1-methylpseudouracil
  misc_difference 65: note = uracil or N1-methylpseudouracil
  misc_difference 70: note = uracil or N1-methylpseudouracil
  misc_difference 71: note = uracil or N1-methylpseudouracil
  misc_difference 74: note = uracil or N1-methylpseudouracil
  misc_difference 82: note = uracil or N1-methylpseudouracil
  misc_difference 90: note = uracil or N1-methylpseudouracil
  misc_difference 93: note = uracil or N1-methylpseudouracil
  misc_difference 95: note = uracil or N1-methylpseudouracil
  misc_difference 96: note = uracil or N1-methylpseudouracil
  misc_difference 97: note = uracil or N1-methylpseudouracil
  misc_difference 101: note = uracil or N1-methylpseudouracil
  misc_difference 106: note = uracil or N1-methylpseudouracil
  misc_difference 108: note = uracil or N1-methylpseudouracil
  misc_difference 112: note = uracil or N1-methylpseudouracil
taagcccctccgggggcctcggtggcctagcttcttgccccttgggcctccccccagcccctcctccccttcctgcacccgtacccccgtggtctttgaataaagtctgagtgggcggc

SEQ ID NO: 142 - skipped

SEQ ID NO: 143 - RNA, 22 nt, synthetic construct
  source 1..22: mol_type = other RNA
tgtcagtttgtcaaatacccca

SEQ ID NO: 144-151 - skipped (8 entries)

SEQ ID NO: 152 - RNA, 22 nt, synthetic construct
  source 1..22: mol_type = other RNA
cgcattattactcacggtacga

SEQ ID NO: 153-173 - skipped (21 entries)

SEQ ID NO: 174 - RNA, 23 nt, synthetic construct
  source 1..23: mol_type = other RNA
tccataaagtaggaaacactaca

SEQ ID NO: 175-195 - skipped (21 entries)

SEQ ID NO: 196 - DNA, 21 bp, synthetic construct
  source 1..21: mol_type = other DNA
  modified_base 1: mod_base = OTHER; note = phosphate-adenosine
  modified_base 21: mod_base = OTHER; note = inverted deoxythymidine
  misc_feature 1..20: note = RNA
  misc_feature 21: note = DNA
aaaaaaaaaaaaaaaaaaaat

SEQ ID NO: 197 - RNA, 125 nt, synthetic construct
  source 1..125: mol_type = other RNA
aaaaaaaaaaaaaaaaaaaaaaaaaaaaaaaaaaaaaaaaaaaaaaaaaaaaaaaaaaaaaaaaaaaaaaaaaaaaaaaaaaaaaaaaaaaaaaaaaaaatctagaaaaaaaaaaaaaaaaaaaa

SEQ ID NO: 198 - DNA, 126 bp, synthetic construct
  source 1..126: mol_type = other DNA
  modified_base 126: mod_base = OTHER; note = inverted deoxythymidine
  misc_feature 1..125: note = RNA
  misc_feature 126: note = DNA
aaaaaaaaaaaaaaaaaaaaaaaaaaaaaaaaaaaaaaaaaaaaaaaaaaaaaaaaaaaaaaaaaaaaaaaaaaaaaaaaaaaaaaaaaaaaaaaaaaaatctagaaaaaaaaaaaaaaaaaaaat

SEQ ID NO: 199 - RNA, 164 nt, synthetic construct; identical to SEQ ID NO: 113
  source 1..164: mol_type = other RNA

SEQ ID NO: 200 - RNA, 87 nt, synthetic construct
  source 1..87: mol_type = other RNA
gacagtgcagtcacccataaagtagaaagcactactaacagcactggagggtgtagtgtttcctactttatggatgagtgtactgtg

SEQ ID NO: 201 - RNA, 23 nt, synthetic construct
  source 1..23: mol_type = other RNA
tgtagtgtttcctactttatgga

SEQ ID NO: 202 - RNA, 23 nt, synthetic construct
  source 1..23: mol_type = other RNA
tccataaagtaggaaacactaca

SEQ ID NO: 203 - RNA, 21 nt, synthetic construct
  source 1..21: mol_type = other RNA
cataaagtagaaagcactact

SEQ ID NO: 204 - RNA, 21 nt, synthetic construct
  source 1..21: mol_type = other RNA
agtagtgctttctactttatg

SEQ ID NO: 205 - RNA, 85 nt, synthetic construct
  source 1..85: mol_type = other RNA
cgctggcgacgggacattattacttttggtacgcgctgtgacacttcaaactcgtaccgtgagtaataatgcgccgtccacggca

SEQ ID NO: 206 - RNA, 22 nt, synthetic construct
  source 1..22: mol_type = other RNA
tcgtaccgtgagtaataatgcg

SEQ ID NO: 207 - RNA, 22 nt, synthetic construct
  source 1..22: mol_type = other RNA
cgcattattactcacggtacga

SEQ ID NO: 208 - RNA, 21 nt, synthetic construct
  source 1..21: mol_type = other RNA
cattattacttttggtacgcg

SEQ ID NO: 209 - DNA, 21 bp, synthetic construct
  source 1..21: mol_type = other DNA
  modified_base 1: mod_base = OTHER; note = phosphate-adenosine
  modified_base 21: mod_base = OTHER; note = inverted deoxythymidine
  misc_feature 1..20: note = RNA
  misc_feature 21: note = DNA
aaaaaaaaaaaaaaaaaaaat

SEQ ID NO: 210 - skipped

SEQ ID NO: 211 - DNA, 126 bp, synthetic construct; identical to SEQ ID NO: 198
  source 1..126: mol_type = other DNA
  modified_base 126: mod_base = OTHER; note = inverted deoxythymidine
  misc_feature 1..125: note = RNA
  misc_feature 126: note = DNA

SEQ ID NO: 212 - RNA, 22 nt, synthetic construct
  source 1..22: mol_type = other RNA
caaacaccattgtcacactcca

SEQ ID NO: 213-219 - skipped (7 entries)

SEQ ID NO: 220 - RNA, 133 nt, synthetic construct
  source 1..133: mol_type = other RNA
gctggagcctcggtggccatgcttcttgccccttgggcctccccccagcccctcctccccttcctgcacccgtaccccctccataaagtaggaaacactacagtggtctttgaataaagtctgagtgggcggc

SEQ ID NO: 221 - RNA, 22 nt, synthetic construct
  source 1..22: mol_type = other RNA
cctctgaaattcagttcttcag

SEQ ID NO: 222 - RNA, 22 nt, synthetic construct
  source 1..22: mol_type = other RNA
tgagaactgaattccatgggtt

SEQ ID NO: 223 - RNA, 22 nt, synthetic construct
  source 1..22: mol_type = other RNA
ctcctacatattagcattaaca

SEQ ID NO: 224 - RNA, 23 nt, synthetic construct
  source 1..23: mol_type = other RNA
ttaatgctaatcgtgataggggt

SEQ ID NO: 225 - RNA, 22 nt, synthetic construct
  source 1..22: mol_type = other RNA
ccagtattaactgtgctgctga

SEQ ID NO: 226 - RNA, 22 nt, synthetic construct
  source 1..22: mol_type = other RNA
tagcagcacgtaaatattggcg

SEQ ID NO: 227 - RNA, 21 nt, synthetic construct
  source 1..21: mol_type = other RNA
caacaccagtcgatgggctgt

SEQ ID NO: 228 - RNA, 22 nt, synthetic construct
  source 1..22: mol_type = other RNA
tagcttatcagactgatgttga

SEQ ID NO: 229 - skipped

SEQ ID NO: 230 - RNA, 22 nt, synthetic construct
  source 1..22: mol_type = other RNA
cgtgtatttgacaagctgagtt

SEQ ID NO: 231 - RNA, 22 nt, synthetic construct
  source 1..22: mol_type = other RNA
tggctcagttcagcaggaacag

SEQ ID NO: 232 - RNA, 22 nt, synthetic construct
  source 1..22: mol_type = other RNA
tgcctactgagctgatatcagt

SEQ ID NO: 233 - RNA, 21 nt, synthetic construct
  source 1..21: mol_type = other RNA
ttcacagtggctaagttccgc

SEQ ID NO: 234 - RNA, 22 nt, synthetic construct
  source 1..22: mol_type = other RNA
agggcttagctgcttgtgagca

SEQ ID NO: 235 - RNA, 141 nt, synthetic construct
  source 1..141: mol_type = other RNA
tgataataggctggagcctcggtggccatgcttcttgccccttgggcctccccccagcccctcctccccttcctgcacccgtaccccccgcattattactcacggtacgagtggtctttgaataaagtctgagtgggcggc

SEQ ID NO: 236 - RNA, 119 nt, synthetic construct; identical to SEQ ID NO: 107
  source 1..119: mol_type = other RNA

SEQ ID NO: 237 - RNA, 142 nt, synthetic construct
  source 1..142: mol_type = other RNA
tgataataggctggagcctcggtggccatgcttcttgccccttgggcctccccccagcccctcctccccttcctgcacccgtaccccctccataaagtaggaaacactacagtggtctttgaataaagtctgagtgggcggc

SEQ ID NO: 238 - skipped

SEQ ID NO: 239 - RNA, 23 nt, synthetic construct
  source 1..23: mol_type = other RNA
ttaatgctaattgtgataggggt

SEQ ID NO: 240 - RNA, 23 nt, synthetic construct
  source 1..23: mol_type = other RNA
acccctatcacaattagcattaa

SEQ ID NO: 241 - RNA, 188 nt, synthetic construct
  source 1..188: mol_type = other RNA
tgataatagtccataaagtaggaaacactacagctggagcctcggtggccatgcttcttgccccttgggcctccataaagtaggaaacactacatccccccagcccctcctccccttcctgcacccgtaccccctccataaagtaggaaacactacagtggtctttgaataaagtctgagtgggcggc

SEQ ID NO: 242 - RNA, 140 nt, synthetic construct
  source 1..140: mol_type = other RNA
tgataataggctggagcctcggtggccatgcttcttgccccttgggcctccccccagcccctcctccccttcctgcacccgtacccccagtagtgctttctactttatggtggtctttgaataaagtctgagtgggcggc

SEQ ID NO: 243 - RNA, 182 nt, synthetic construct
  source 1..182: mol_type = other RNA
tgataatagagtagtgctttctactttatggctggagcctcggtggccatgcttcttgccccttgggccagtagtgctttctactttatgtccccccagcccctcctccccttcctgcacccgtacccccagtagtgctttctactttatggtggtctttgaataaagtctgagtgggcggc

SEQ ID NO: 244 - RNA, 184 nt, synthetic construct
  source 1..184: mol_type = other RNA
tgataatagagtagtgctttctactttatggctggagcctcggtggccatgcttcttgccccttgggcctccataaagtaggaaacactacatccccccagcccctcctccccttcctgcacccgtacccccagtagtgctttctactttatggtggtctttgaataaagtctgagtgggcggc

SEQ ID NO: 245 - RNA, 142 nt, synthetic construct
  source 1..142: mol_type = other RNA
tgataataggctggagcctcggtggccatgcttcttgccccttgggcctccccccagcccctcctccccttcctgcacccgtacccccacccctatcacaattagcattaagtggtctttgaataaagtctgagtgggcggc

SEQ ID NO: 246 - RNA, 188 nt, synthetic construct
  source 1..188: mol_type = other RNA
tgataatagacccctatcacaattagcattaagctggagcctcggtggccatgcttcttgccccttgggccacccctatcacaattagcattaatccccccagcccctcctccccttcctgcacccgtacccccacccctatcacaattagcattaagtggtctttgaataaagtctgagtgggcggc

SEQ ID NO: 247 - RNA, 188 nt, synthetic construct
  source 1..188: mol_type = other RNA
tgataatagacccctatcacaattagcattaagctggagcctcggtggccatgcttcttgccccttgggcctccataaagtaggaaacactacatccccccagcccctcctccccttcctgcacccgtacccccacccctatcacaattagcattaagtggtctttgaataaagtctgagtgggcggc

SEQ ID NO: 248 - RNA, 142 nt, synthetic construct
  source 1..142: mol_type = other RNA
tgataatagtccataaagtaggaaacactacagctggagcctcggtggccatgcttcttgccccttgggcctccccccagcccctcctccccttcctgcacccgtacccccgtggtctttgaataaagtctgagtgggcggc

SEQ ID NO: 249 - RNA, 142 nt, synthetic construct
  source 1..142: mol_type = other RNA
tgataataggctggagcctcggtggctccataaagtaggaaacactacacatgcttcttgccccttgggcctccccccagcccctcctccccttcctgcacccgtacccccgtggtctttgaataaagtctgagtgggcggc

SEQ ID NO: 250 - RNA, 142 nt, synthetic construct
  source 1..142: mol_type = other RNA
tgataataggctggagcctcggtggccatgcttcttgccccttgggcctccataaagtaggaaacactacatccccccagcccctcctccccttcctgcacccgtacccccgtggtctttgaataaagtctgagtgggcggc

SEQ ID NO: 251 - RNA, 70 nt, synthetic construct
  source 1..70: mol_type = other RNA
gggaaataagagtccataaagtaggaaacactacaagaaaagaagagtaagaagaaatataagagccacc

SEQ ID NO: 252 - RNA, 70 nt, synthetic construct
  source 1..70: mol_type = other RNA
gggaaataagagagaaaagaagagtaatccataaagtaggaaacactacagaagaaatataagagccacc

SEQ ID NO: 253 - RNA, 70 nt, synthetic construct
  source 1..70: mol_type = other RNA
gggaaataagagagaaaagaagagtaagaagaaatataatccataaagtaggaaacactacagagccacc

SEQ ID NO: 254 - RNA, 23 nt, synthetic construct
  source 1..23: mol_type = other RNA
acccctatcacaattagcattaa

SEQ ID NO: 255 - RNA, 181 nt, synthetic construct
  source 1..181: mol_type = other RNA
tgataatagagtagtgctttctactttatggctggagcctcggtggccatgcttcttgccccttgggccagtagtgctttctactttatgtccccccagcccctctccccttcctgcacccgtacccccagtagtgctttctactttatggtggtctttgaataaagtctgagtgggcggc

SEQ ID NO: 256 - RNA, 142 nt, synthetic construct
  source 1..142: mol_type = other RNA
tgataataggctggagcctcggtggccatgcttcttgccccttccataaagtaggaaacactacatgggcctccccccagcccctcctccccttcctgcacccgtacccccgtggtctttgaataaagtctgagtgggcggc

SEQ ID NO: 257 - RNA, 142 nt, synthetic construct
  source 1..142: mol_type = other RNA
tgataataggctggagcctcggtggccatgcttcttgccccttgggcctccccccagtccataaagtaggaaacactacacccctcctccccttcctgcacccgtacccccgtggtctttgaataaagtctgagtgggcggc

SEQ ID NO: 258 - RNA, 142 nt, synthetic construct
  source 1..142: mol_type = other RNA
tgataataggctggagcctcggtggccatgcttcttgccccttgggcctccccccagcccctcctccccttctccataaagtaggaaacactacactgcacccgtacccccgtggtctttgaataaagtctgagtgggcggc

SEQ ID NO: 259 - RNA, 142 nt, synthetic construct
  source 1..142: mol_type = other RNA
tgataataggctggagcctcggtggccatgcttcttgccccttgggcctccccccagcccctcctccccttcctgcacccgtacccccgtggtctttgaataaagttccataaagtaggaaacactacactgagtgggcggc

SEQ ID NO: 260 - RNA, 164 nt, synthetic construct
  source 1..164: mol_type = other RNA
tgataatagtccataaagtaggaaacactacagctggagcctcggtggcctagcttcttgccccttgggcctccccccagcccctcctccccttcctgcacccgtaccccccgcattattactcacggtacgagtggtctttgaataaagtctgagtgggcggc

SEQ ID NO: 261 - RNA, 119 nt, synthetic construct; identical to SEQ ID NO: 108
  source 1..119: mol_type = other RNA

SEQ ID NO: 262 - RNA, 141 nt, synthetic construct; identical to SEQ ID NO: 112
  source 1..141: mol_type = other RNA

SEQ ID NO: 263 - RNA, 188 nt, synthetic construct; identical to SEQ ID NO: 114
  source 1..188: mol_type = other RNA

SEQ ID NO: 264 - RNA, 142 nt, synthetic construct
  source 1..142: mol_type = other RNA
tgataatagtccataaagtaggaaacactacagctggagcctcggtggcctagcttcttgccccttgggcctccccccagcccctcctccccttcctgcacccgtacccccgtggtctttgaataaagtctgagtgggcggc

SEQ ID NO: 265 - RNA, 142 nt, synthetic construct
  source 1..142: mol_type = other RNA
tgataataggctggagcctcggtggctccataaagtaggaaacactacactagcttcttgccccttgggcctccccccagcccctcctccccttcctgcacccgtacccccgtggtctttgaataaagtctgagtgggcggc

SEQ ID NO: 266 - RNA, 142 nt, synthetic construct
  source 1..142: mol_type = other RNA
tgataataggctggagcctcggtggcctagcttcttgccccttgggcctccataaagtaggaaacactacatccccccagcccctcctccccttcctgcacccgtacccccgtggtctttgaataaagtctgagtgggcggc

SEQ ID NO: 267 - RNA, 142 nt, synthetic construct
  source 1..142: mol_type = other RNA
tgataataggctggagcctcggtggcctagcttcttgccccttgggcctccccccagcccctcctccccttcctgcacccgtacccccacccctatcacaattagcattaagtggtctttgaataaagtctgagtgggcggc

SEQ ID NO: 268 - RNA, 188 nt, synthetic construct
  source 1..188: mol_type = other RNA
tgataatagacccctatcacaattagcattaagctggagcctcggtggcctagcttcttgccccttgggccacccctatcacaattagcattaatccccccagcccctcctccccttcctgcacccgtacccccacccctatcacaattagcattaagtggtctttgaataaagtctgagtgggcggc

SEQ ID NO: 269 - RNA, 188 nt, synthetic construct
  source 1..188: mol_type = other RNA
tgataatagacccctatcacaattagcattaagctggagcctcggtggcctagcttcttgccccttgggcctccataaagtaggaaacactacatccccccagcccctcctccccttcctgcacccgtacccccacccctatcacaattagcattaagtggtctttgaataaagtctgagtgggcggc

SEQ ID NO: 270 - skipped

SEQ ID NO: 271 - RNA, 47 nt, synthetic construct
  source 1..47: mol_type = other RNA
aggaaataagagagaaaagaagagtaagaagaaatataagagccacc

SEQ ID NO: 272 - RNA, 57 nt, synthetic construct
  source 1..57: mol_type = other RNA
gggaaataagagagaaaagaagagtaagaagaaatataagaccccggcgccgccacc

SEQ ID NO: 273 - RNA, 57 nt, synthetic construct
  source 1..57: mol_type = other RNA
aggaaataagagagaaaagaagagtaagaagaaatataagaccccggcgccgccacc

SEQ ID NO: 274 - RNA, 47 nt, synthetic construct
  source 1..47: mol_type = other RNA
gggagatcagagagaaaagaagagtaagaagaaatataagagccacc

SEQ ID NO: 275-299 - skipped (25 entries)

SEQ ID NO: 300 - RNA, 1502 nt, synthetic construct
  source 1..1502: mol_type = other RNA
  modified_base 6: mod_base = OTHER; note = N1-methylpseudouracil
  modified_base 14: mod_base = OTHER; note = N1-methylpseudouracil
  modified_base 15: mod_base = OTHER; note = N1-methylpseudouracil
  modified_base 16: mod_base = OTHER; note = N1-methylpseudouracil
  modified_base 19: mod_base = OTHER; note = N1-methylpseudouracil
  modified_base 21: mod_base = OTHER; note = N1-methylpseudouracil
  modified_base 22: mod_base = OTHER; note = N1-methylpseudouracil
  modified_base 27: mod_base = OTHER; note = N1-methylpseudouracil
  modified_base 28: mod_base = OTHER; note = N1-methylpseudouracil
  modified_base 32: mod_base = OTHER; note = N1-methylpseudouracil
  modified_base 33: mod_base = OTHER; note = N1-methylpseudouracil
  modified_base 34: mod_base = OTHER; note = N1-methylpseudouracil
  modified_base 36: mod_base = OTHER; note = N1-methylpseudouracil
  modified_base 37: mod_base = OTHER; note = N1-methylpseudouracil
  modified_base 38: mod_base = OTHER; note = N1-methylpseudouracil
  modified_base 39: mod_base = OTHER; note = N1-methylpseudouracil
  modified_base 42: mod_base = OTHER; note = N1-methylpseudouracil
  modified_base 43: mod_base = OTHER; note = N1-methylpseudouracil
  modified_base 44: mod_base = OTHER; note = N1-methylpseudouracil
  modified_base 45: mod_base = OTHER; note = N1-methylpseudouracil
  modified_base 47: mod_base = OTHER; note = N1-methylpseudouracil
  modified_base 54: mod_base = OTHER; note = N1-methylpseudouracil
  modified_base 62: mod_base = OTHER; note = N1-methylpseudouracil
  modified_base 63: mod_base = OTHER; note = N1-methylpseudouracil
  modified_base 64: mod_base = OTHER; note = N1-methylpseudouracil
  modified_base 65: mod_base = OTHER; note = N1-methylpseudouracil
  modified_base 66: mod_base = OTHER; note = N1-methylpseudouracil
  modified_base 68: mod_base = OTHER; note = N1-methylpseudouracil
  modified_base 69: mod_base = OTHER; note = N1-methylpseudouracil
  modified_base 71: mod_base = OTHER; note = N1-methylpseudouracil
  modified_base 77: mod_base = OTHER; note = N1-methylpseudouracil
  modified_base 82: mod_base = OTHER; note = N1-methylpseudouracil
  modified_base 85: mod_base = OTHER; note = N1-methylpseudouracil
  modified_base 91: mod_base = OTHER; note = N1-methylpseudouracil
  modified_base 105: mod_base = OTHER; note = N1-methylpseudouracil
  modified_base 108: mod_base = OTHER; note = N1-methylpseudouracil
  modified_base 111: mod_base = OTHER; note = N1-methylpseudouracil
  modified_base 133: mod_base = OTHER; note = N1-methylpseudouracil
  modified_base 146: mod_base = OTHER; note = N1-methylpseudouracil
  modified_base 157: mod_base = OTHER; note = N1-methylpseudouracil
  modified_base 164: mod_base = OTHER; note = N1-methylpseudouracil
  modified_base 175: mod_base = OTHER; note = N1-methylpseudouracil
  modified_base 182: mod_base = OTHER; note = N1-methylpseudouracil
  modified_base 194: mod_base = OTHER; note = N1-methylpseudouracil
  modified_base 199: mod_base = OTHER; note = N1-methylpseudouracil
  modified_base 200: mod_base = OTHER; note = N1-methylpseudouracil
  modified_base 206: mod_base = OTHER; note = N1-methylpseudouracil
  modified_base 227: mod_base = OTHER; note = N1-methylpseudouracil
  modified_base 235: mod_base = OTHER; note = N1-methylpseudouracil
  modified_base 236: mod_base = OTHER; note = N1-methylpseudouracil
  modified_base 238: mod_base = OTHER; note = N1-methylpseudouracil
  modified_base 247: mod_base = OTHER; note = N1-methylpseudouracil
  modified_base 251: mod_base = OTHER; note = N1-methylpseudouracil
  modified_base 253: mod_base = OTHER; note = N1-methylpseudouracil
  modified_base 254: mod_base = OTHER; note = N1-methylpseudouracil
  modified_base 257: mod_base = OTHER; note = N1-methylpseudouracil
  modified_base 269: mod_base = OTHER; note = N1-methylpseudouracil
  modified_base 278: mod_base = OTHER; note = N1-methylpseudouracil
  modified_base 281: mod_base = OTHER; note = N1-methylpseudouracil
  modified_base 296: mod_base = OTHER; note = N1-methylpseudouracil
  modified_base 308: mod_base = OTHER; note = N1-methylpseudouracil
  modified_base 317: mod_base = OTHER; note = N1-methylpseudouracil
  modified_base 323: mod_base = OTHER; note = N1-methylpseudouracil
  modified_base 326: mod_base = OTHER; note = N1-methylpseudouracil
  modified_base 332: mod_base = OTHER; note = N1-methylpseudouracil
  modified_base 341: mod_base = OTHER; note = N1-methylpseudouracil
  modified_base 355: mod_base = OTHER; note = N1-methylpseudouracil
  modified_base 364: mod_base = OTHER; note = N1-methylpseudouracil
  modified_base 365: mod_base = OTHER; note = N1-methylpseudouracil
  modified_base 369: mod_base = OTHER; note = N1-methylpseudouracil
  modified_base 374: mod_base = OTHER; note = N1-methylpseudouracil
  modified_base 377: mod_base = OTHER; note = N1-methylpseudouracil
  modified_base 380: mod_base = OTHER; note = N1-methylpseudouracil
  modified_base 385: mod_base = OTHER; note = N1-methylpseudouracil
  modified_base 389: mod_base = OTHER; note = N1-methylpseudouracil
  modified_base 395: mod_base = OTHER; note = N1-methylpseudouracil
  modified_base 400: mod_base = OTHER; note = N1-methylpseudouracil
  modified_base 404: mod_base = OTHER; note = N1-methylpseudouracil
  modified_base 406: mod_base = OTHER; note = N1-methylpseudouracil
  modified_base 423: mod_base = OTHER; note = N1-methylpseudouracil
  modified_base 428: mod_base = OTHER; note = N1-methylpseudouracil
  modified_base 437: mod_base = OTHER; note = N1-methylpseudouracil
  modified_base 440: mod_base = OTHER; note = N1-methylpseudouracil
  modified_base 452: mod_base = OTHER; note = N1-methylpseudouracil
  modified_base 458: mod_base = OTHER; note = N1-methylpseudouracil
  modified_base 463: mod_base = OTHER; note = N1-methylpseudouracil
  modified_base 466: mod_base = OTHER; note = N1-methylpseudouracil
  modified_base 473: mod_base = OTHER; note = N1-methylpseudouracil
  modified_base 485: mod_base = OTHER; note = N1-methylpseudouracil
  modified_base 491: mod_base = OTHER; note = N1-methylpseudouracil
  modified_base 495: mod_base = OTHER; note = N1-methylpseudouracil
  modified_base 500: mod_base = OTHER; note = N1-methylpseudouracil
  modified_base 503: mod_base = OTHER; note = N1-methylpseudouracil
  modified_base 506: mod_base = OTHER; note = N1-methylpseudouracil
  modified_base 508: mod_base = OTHER; note = N1-methylpseudouracil
  modified_base 517: mod_base = OTHER; note = N1-methylpseudouracil
  modified_base 521: mod_base = OTHER; note = N1-methylpseudouracil
  modified_base 524: mod_base = OTHER; note = N1-methylpseudouracil
  modified_base 532: mod_base = OTHER; note = N1-methylpseudouracil
  modified_base 560: mod_base = OTHER; note = N1-methylpseudouracil
  modified_base 565: mod_base = OTHER; note = N1-methylpseudouracil
  modified_base 575: mod_base = OTHER; note = N1-methylpseudouracil
  modified_base 581: mod_base = OTHER; note = N1-methylpseudouracil
  modified_base 584: mod_base = OTHER; note = N1-methylpseudouracil
  modified_base 586: mod_base = OTHER; note = N1-methylpseudouracil
  modified_base 587: mod_base = OTHER; note = N1-methylpseudouracil
  modified_base 589: mod_base = OTHER; note = N1-methylpseudouracil
  modified_base 592: mod_base = OTHER; note = N1-methylpseudouracil
  modified_base 593: mod_base = OTHER; note = N1-methylpseudouracil
  modified_base 607: mod_base = OTHER; note = N1-methylpseudouracil
  modified_base 619: mod_base = OTHER; note = N1-methylpseudouracil
  modified_base 620: mod_base = OTHER; note = N1-methylpseudouracil
  modified_base 622: mod_base = OTHER; note = N1-methylpseudouracil
  modified_base 623: mod_base = OTHER; note = N1-methylpseudouracil
  modified_base 626: mod_base = OTHER; note = N1-methylpseudouracil
  modified_base 629: mod_base = OTHER; note = N1-methylpseudouracil
  modified_base 635: mod_base = OTHER; note = N1-methylpseudouracil
  modified_base 638: mod_base = OTHER; note = N1-methylpseudouracil
  modified_base 641: mod_base = OTHER; note = N1-methylpseudouracil
  modified_base 647: mod_base = OTHER; note = N1-methylpseudouracil
  modified_base 658: mod_base = OTHER; note = N1-methylpseudouracil
  modified_base 660: mod_base = OTHER; note = N1-methylpseudouracil
  modified_base 665: mod_base = OTHER; note = N1-methylpseudouracil
  modified_base 671: mod_base = OTHER; note = N1-methylpseudouracil
  modified_base 674: mod_base = OTHER; note = N1-methylpseudouracil
  modified_base 683: mod_base = OTHER; note = N1-methylpseudouracil
  modified_base 685: mod_base = OTHER; note = N1-methylpseudouracil
  modified_base 686: mod_base = OTHER; note = N1-methylpseudouracil
  modified_base 695: mod_base = OTHER; note = N1-methylpseudouracil
  modified_base 701: mod_base = OTHER; note = N1-methylpseudouracil
  modified_base 719: mod_base = OTHER; note = N1-methylpseudouracil
  modified_base 722: mod_base = OTHER; note = N1-methylpseudouracil
  modified_base 731: mod_base = OTHER; note = N1-methylpseudouracil
  modified_base 734: mod_base = OTHER; note = N1-methylpseudouracil
  modified_base 740: mod_base = OTHER; note = N1-methylpseudouracil
  modified_base 748: mod_base = OTHER; note = N1-methylpseudouracil
  modified_base 752: mod_base = OTHER; note = N1-methylpseudouracil
  modified_base 764: mod_base = OTHER; note = N1-methylpseudouracil
  modified_base 770: mod_base = OTHER; note = N1-methylpseudouracil
  modified_base 772: mod_base = OTHER; note = N1-methylpseudouracil
  modified_base 773: mod_base = OTHER; note = N1-methylpseudouracil
  modified_base 782: mod_base = OTHER; note = N1-methylpseudouracil
  modified_base 794: mod_base = OTHER; note = N1-methylpseudouracil
  modified_base 808: mod_base = OTHER; note = N1-methylpseudouracil
  modified_base 809: mod_base = OTHER; note = N1-methylpseudouracil
  modified_base 811: mod_base = OTHER; note = N1-methylpseudouracil
  modified_base 812: mod_base = OTHER; note = N1-methylpseudouracil
  modified_base 818: mod_base = OTHER; note = N1-methylpseudouracil
  modified_base 821: mod_base = OTHER; note = N1-methylpseudouracil
  modified_base 827: mod_base = OTHER; note = N1-methylpseudouracil
  modified_base 829: mod_base = OTHER; note = N1-methylpseudouracil
  modified_base 833: mod_base = OTHER; note = N1-methylpseudouracil
  modified_base 835: mod_base = OTHER; note = N1-methylpseudouracil
  modified_base 841: mod_base = OTHER; note = N1-methylpseudouracil
  modified_base 852: mod_base = OTHER; note = N1-methylpseudouracil
  modified_base 860: mod_base = OTHER; note = N1-methylpseudouracil
  modified_base 872: mod_base = OTHER; note = N1-methylpseudouracil
  modified_base 875: mod_base = OTHER; note = N1-methylpseudouracil
  modified_base 877: mod_base = OTHER; note = N1-methylpseudouracil
  modified_base 886: mod_base = OTHER; note = N1-methylpseudouracil
  modified_base 887: mod_base = OTHER; note = N1-methylpseudouracil
  modified_base 889: mod_base = OTHER; note = N1-methylpseudouracil
  modified_base 907: mod_base = OTHER; note = N1-methylpseudouracil
  modified_base 908: mod_base = OTHER; note = N1-methylpseudouracil
  modified_base 909: mod_base = OTHER; note = N1-methylpseudouracil
  modified_base 912: mod_base = OTHER; note = N1-methylpseudouracil
  modified_base 918: mod_base = OTHER; note = N1-methylpseudouracil
  modified_base 924: mod_base = OTHER; note = N1-methylpseudouracil
  modified_base 931: mod_base = OTHER; note = N1-methylpseudouracil
  modified_base 938: mod_base = OTHER; note = N1-methylpseudouracil
  modified_base 940: mod_base = OTHER; note = N1-methylpseudouracil
  modified_base 941: mod_base = OTHER; note = N1-methylpseudouracil
  modified_base 946: mod_base = OTHER; note = N1-methylpseudouracil
  modified_base 949: mod_base = OTHER; note = N1-methylpseudouracil
  modified_base 950: mod_base = OTHER; note = N1-methylpseudouracil
  modified_base 956: mod_base = OTHER; note = N1-methylpseudouracil
  modified_base 959: mod_base = OTHER; note = N1-methylpseudouracil
  modified_base 962: mod_base = OTHER; note = N1-methylpseudouracil
  modified_base 968: mod_base = OTHER; note = N1-methylpseudouracil
  modified_base 969: mod_base = OTHER; note = N1-methylpseudouracil
  modified_base 981: mod_base = OTHER; note = N1-methylpseudouracil
  modified_base 996: mod_base = OTHER; note = N1-methylpseudouracil
  modified_base 1003: mod_base = OTHER; note = N1-methylpseudouracil
  modified_base 1004: mod_base = OTHER; note = N1-methylpseudouracil
  modified_base 1007: mod_base = OTHER; note = N1-methylpseudouracil
  modified_base 1016: mod_base = OTHER; note = N1-methylpseudouracil
  modified_base 1024: mod_base = OTHER; note = N1-methylpseudouracil
  modified_base 1028: mod_base = OTHER; note = N1-methylpseudouracil
  modified_base 1048: mod_base = OTHER; note = N1-methylpseudouracil
  modified_base 1049: mod_base = OTHER; note = N1-methylpseudouracil
  modified_base 1052: mod_base = OTHER; note = N1-methylpseudouracil
  modified_base 1054: mod_base = OTHER; note = N1-methylpseudouracil
  modified_base 1057: mod_base = OTHER; note = N1-methylpseudouracil
  modified_base 1061: mod_base = OTHER; note = N1-methylpseudouracil
  modified_base 1075: mod_base = OTHER; note = N1-methylpseudouracil
  modified_base 1079: mod_base = OTHER; note = N1-methylpseudouracil
  modified_base 1087: mod_base = OTHER; note = N1-methylpseudouracil
  modified_base 1088: mod_base = OTHER; note = N1-methylpseudouracil
  modified_base 1091: mod_base = OTHER; note = N1-methylpseudouracil
  modified_base 1094: mod_base = OTHER; note = N1-methylpseudouracil
  modified_base 1096: mod_base = OTHER; note = N1-methylpseudouracil
  modified_base 1115: mod_base = OTHER; note = N1-methylpseudouracil
  modified_base 1126: mod_base = OTHER; note = N1-methylpseudouracil
  modified_base 1135: mod_base = OTHER; note = N1-methylpseudouracil
  modified_base 1139: mod_base = OTHER; note = N1-methylpseudouracil
  modified_base 1148: mod_base = OTHER; note = N1-methylpseudouracil
  modified_base 1151: mod_base = OTHER; note = N1-methylpseudouracil
  modified_base 1153: mod_base = OTHER; note = N1-methylpseudouracil
  modified_base 1157: mod_base = OTHER; note = N1-methylpseudouracil
  modified_base 1165: mod_base = OTHER; note = N1-methylpseudouracil
  modified_base 1172: mod_base = OTHER; note = N1-methylpseudouracil
  modified_base 1178: mod_base = OTHER; note = N1-methylpseudouracil
  modified_base 1181: mod_base = OTHER; note = N1-methylpseudouracil
  modified_base 1189: mod_base = OTHER; note = N1-methylpseudouracil
  modified_base 1193: mod_base = OTHER; note = N1-methylpseudouracil
  modified_base 1196: mod_base = OTHER; note = N1-methylpseudouracil
  modified_base 1199: mod_base = OTHER; note = N1-methylpseudouracil
  modified_base 1246: mod_base = OTHER; note = N1-methylpseudouracil
  modified_base 1253: mod_base = OTHER; note = N1-methylpseudouracil
  modified_base 1260: mod_base = OTHER; note = N1-methylpseudouracil
  modified_base 1278: mod_base = OTHER; note = N1-methylpseudouracil
  modified_base 1283: mod_base = OTHER; note = N1-methylpseudouracil
  modified_base 1286: mod_base = OTHER; note = N1-methylpseudouracil
  modified_base 1291: mod_base = OTHER; note = N1-methylpseudouracil
  modified_base 1292: mod_base = OTHER; note = N1-methylpseudouracil
  modified_base 1295: mod_base = OTHER; note = N1-methylpseudouracil
  modified_base 1304: mod_base = OTHER; note = N1-methylpseudouracil
  modified_base 1328: mod_base = OTHER; note = N1-methylpseudouracil
  modified_base 1331: mod_base = OTHER; note = N1-methylpseudouracil
  modified_base 1352: mod_base = OTHER; note = N1-methylpseudouracil
  modified_base 1359: mod_base = OTHER; note = N1-methylpseudouracil
  modified_base 1364: mod_base = OTHER; note = N1-methylpseudouracil
  modified_base 1367: mod_base = OTHER; note = N1-methylpseudouracil
  modified_base 1373: mod_base = OTHER; note = N1-methylpseudouracil
  modified_base 1378: mod_base = OTHER; note = N1-methylpseudouracil
  modified_base 1384: mod_base = OTHER; note = N1-methylpseudouracil
  modified_base 1388: mod_base = OTHER; note = N1-methylpseudouracil
  modified_base 1390: mod_base = OTHER; note = N1-methylpseudouracil
  modified_base 1395: mod_base = OTHER; note = N1-methylpseudouracil
  modified_base 1402: mod_base = OTHER; note = N1-methylpseudouracil
  modified_base 1406: mod_base = OTHER; note = N1-methylpseudouracil
  modified_base 1411: mod_base = OTHER; note = N1-methylpseudouracil
  modified_base 1415: mod_base = OTHER; note = N1-methylpseudouracil
  modified_base 1416: mod_base = OTHER; note = N1-methylpseudouracil
  modified_base 1418: mod_base = OTHER; note = N1-methylpseudouracil
  modified_base 1419: mod_base = OTHER; note = N1-methylpseudouracil
  modified_base 1425: mod_base = OTHER; note = N1-methylpseudouracil
  modified_base 1426: mod_base = OTHER; note = N1-methylpseudouracil
  modified_base 1432: mod_base = OTHER; note = N1-methylpseudouracil
  modified_base 1445: mod_base = OTHER; note = N1-methylpseudouracil
  modified_base 1448: mod_base = OTHER; note = N1-methylpseudouracil
  modified_base 1453: mod_base = OTHER; note = N1-methylpseudouracil
  modified_base 1454: mod_base = OTHER; note = N1-methylpseudouracil
  modified_base 1457: mod_base = OTHER; note = N1-methylpseudouracil
  modified_base 1465: mod_base = OTHER; note = N1-methylpseudouracil
  modified_base 1473: mod_base = OTHER; note = N1-methylpseudouracil
  modified_base 1476: mod_base = OTHER; note = N1-methylpseudouracil
  modified_base 1478: mod_base = OTHER; note = N1-methylpseudouracil
  modified_base 1479: mod_base = OTHER; note = N1-methylpseudouracil
  modified_base 1480: mod_base = OTHER; note = N1-methylpseudouracil
  modified_base 1484: mod_base = OTHER; note = N1-methylpseudouracil
  modified_base 1489: mod_base = OTHER; note = N1-methylpseudouracil
  modified_base 1491: mod_base = OTHER; note = N1-methylpseudouracil
  modified_base 1495: mod_base = OTHER; note = N1-methylpseudouracil
ggaaatcgcaaaatttgctcttcgcgttagatttcttttagttttctcgcaactagcaagctttttgttctcgccatggggtcgtcgaagtcgaagccgaaagatcctagtcagcgcaggaggggaggaggatccgcccacgccatggagaacagctggaccatcagcaaggagtaccacatcgacgaggaggtgggcttcgccctgcccaacccacaggagaacctgcccgacttctacaacgactggatgttcatcgccaagcacctgcccgacctgatcgagagcgggcagctgcgggaacgggtggagaagctgaacatgctgagcatcgaccacctgaccgaccacaagtcccagcggttggctcggctggtgctgggctgcatcaccatggcctacgtgtggggaaaggggcacggtgacgtgcggaaggtgctgccccgcaacatcgccgtgccctactgccagctgagcaagaagctggagctgcctccgatcctggtgtacgccgactgcgtgctggccaactggaagaagaaggaccccaacaagcccctgacctacgagaacatggacgtgctgttctccttccgggacggggactgcagcaaggggttcttcctggtgagcctgctggtggagatcgccgccgcctctgccatcaaggtgatccccaccgtgttcaaggccatgcagatgcaggagagggacaccctgctgaaggccctgctggagatcgccagctgcctggagaaggccctgcaggtgttccaccagatccacgaccacgtgaaccccaaggccttcttcagcgtgctgcgcatctacctgtccggctggaagggcaatccccagctgagcgacggcctggtgtacgagggcttctgggaggaccccaaggaatttgctggcggtagcgctggccagtccagcgtgttccagtgcttcgacgtgctgctgggcattcagcaaaccgctggaggcggacacgctgcccagttcctgcaggacatgcggcggtacatgccaccggcccaccgcaacttcctgtgctccctggagagcaacccctccgtgcgggagttcgtgctgtccaagggcgacgccggactgagggaggcctacgacgcctgcgtgaaggccctggtgtccctgcgcagctaccacctgcagatcgtgaccaagtacatcctgatccccgcaagccagcagcccaaggagaacaagaccagcgaggacccctccaagctggaagctaagggcaccggcggcactgacctgatgaacttcctgaagaccgtgcggagcaccaccgagaagagcctgctgaaggagggcgggaagccgatcccgaatcccctcctcgggctcgactcgacgtaagtctccgctggagcctcggtggcctagcttcttgccccttgggcctccccccagcccctcctccccttcctgcacccgtacccccgtggtctttgaataaagtctgagtgggcggc

SEQ ID NO: 301 - RNA, 1502 nt, synthetic construct; identical to SEQ ID NO: 300
  source 1..1502: mol_type = other RNA
  modified_base 6: mod_base = OTHER; note = N1-methylpseudouracil
  modified_base 14: mod_base = OTHER; note = N1-methylpseudouracil
  modified_base 15: mod_base = OTHER; note = N1-methylpseudouracil
  modified_base 16: mod_base = OTHER; note = N1-methylpseudouracil
  modified_base 19: mod_base = OTHER; note = N1-methylpseudouracil
  modified_base 21: mod_base = OTHER; note = N1-methylpseudouracil
  modified_base 22: mod_base = OTHER; note = N1-methylpseudouracil
  modified_base 27: mod_base = OTHER; note = N1-methylpseudouracil
  modified_base 28: mod_base = OTHER; note = N1-methylpseudouracil
  modified_base 32: mod_base = OTHER; note = N1-methylpseudouracil
  modified_base 33: mod_base = OTHER; note = N1-methylpseudouracil
  modified_base 34: mod_base = OTHER; note = N1-methylpseudouracil
  modified_base 36: mod_base = OTHER; note = N1-methylpseudouracil
  modified_base 37: mod_base = OTHER; note = N1-methylpseudouracil
  modified_base 38: mod_base = OTHER; note = N1-methylpseudouracil
  modified_base 39: mod_base = OTHER; note = N1-methylpseudouracil
  modified_base 42: mod_base = OTHER; note = N1-methylpseudouracil
  modified_base 43: mod_base = OTHER; note = N1-methylpseudouracil
  modified_base 44: mod_base = OTHER; note = N1-methylpseudouracil
  modified_base 45: mod_base = OTHER; note = N1-methylpseudouracil
  modified_base 47: mod_base = OTHER; note = N1-methylpseudouracil
  modified_base 54: mod_base = OTHER; note = N1-methylpseudouracil
  modified_base 62: mod_base = OTHER; note = N1-methylpseudouracil
  modified_base 63: mod_base = OTHER; note = N1-methylpseudouracil
  modified_base 64: mod_base = OTHER; note = N1-methylpseudouracil
  modified_base 65: mod_base = OTHER; note = N1-methylpseudouracil
  modified_base 66: mod_base = OTHER; note = N1-methylpseudouracil
  modified_base 68: mod_base = OTHER; note = N1-methylpseudouracil
  modified_base 69: mod_base = OTHER; note = N1-methylpseudouracil
  modified_base 71: mod_base = OTHER; note = N1-methylpseudouracil
  modified_base 77: mod_base = OTHER; note = N1-methylpseudouracil
  modified_base 82: mod_base = OTHER; note = N1-methylpseudouracil
  modified_base 85: mod_base = OTHER; note = N1-methylpseudouracil
  modified_base 91: mod_base = OTHER; note = N1-methylpseudouracil
  modified_base 105: mod_base = OTHER; note = N1-methylpseudouracil
  modified_base 108: mod_base = OTHER; note = N1-methylpseudouracil
  modified_base 111: mod_base = OTHER; note = N1-methylpseudouracil
  modified_base 133: mod_base = OTHER; note = N1-methylpseudouracil
  modified_base 146: mod_base = OTHER; note = N1-methylpseudouracil
  modified_base 157: mod_base = OTHER; note = N1-methylpseudouracil
  modified_base 164: mod_base = OTHER; note = N1-methylpseudouracil
  modified_base 175: mod_base = OTHER; note = N1-methylpseudouracil
  modified_base 182: mod_base = OTHER; note = N1-methylpseudouracil
  modified_base 194: mod_base = OTHER; note = N1-methylpseudouracil
  modified_base 199: mod_base = OTHER; note = N1-methylpseudouracil
  modified_base 200: mod_base = OTHER; note = N1-methylpseudouracil
  modified_base 206: mod_base = OTHER; note = N1-methylpseudouracil
  modified_base 227: mod_base = OTHER; note = N1-methylpseudouracil
  modified_base 235: mod_base = OTHER; note = N1-methylpseudouracil
  modified_base 236: mod_base = OTHER; note = N1-methylpseudouracil
  modified_base 238: mod_base = OTHER; note = N1-methylpseudouracil
  modified_base 247: mod_base = OTHER; note = N1-methylpseudouracil
  modified_base 251: mod_base = OTHER; note = N1-methylpseudouracil
  modified_base 253: mod_base = OTHER; note = N1-methylpseudouracil
  modified_base 254: mod_base = OTHER; note = N1-methylpseudouracil
  modified_base 257: mod_base = OTHER; note = N1-methylpseudouracil
  modified_base 269: mod_base = OTHER; note = N1-methylpseudouracil
  modified_base 278: mod_base = OTHER; note = N1-methylpseudouracil
  modified_base 281: mod_base = OTHER; note = N1-methylpseudouracil
  modified_base 296: mod_base = OTHER; note = N1-methylpseudouracil
  modified_base 308: mod_base = OTHER; note = N1-methylpseudouracil
  modified_base 317: mod_base = OTHER; note = N1-methylpseudouracil
  modified_base 323: mod_base = OTHER; note = N1-methylpseudouracil
  modified_base 326: mod_base = OTHER; note = N1-methylpseudouracil
  modified_base 332: mod_base = OTHER; note = N1-methylpseudouracil
  modified_base 341: mod_base = OTHER; note = N1-methylpseudouracil
  modified_base 355: mod_base = OTHER; note = N1-methylpseudouracil
  modified_base 364: mod_base = OTHER; note = N1-methylpseudouracil
  modified_base 365: mod_base = OTHER; note = N1-methylpseudouracil
  modified_base 369: mod_base = OTHER; note = N1-methylpseudouracil
  modified_base 374: mod_base = OTHER; note = N1-methylpseudouracil
  modified_base 377: mod_base = OTHER; note = N1-methylpseudouracil
  modified_base 380: mod_base = OTHER; note = N1-methylpseudouracil
  modified_base 385: mod_base = OTHER; note = N1-methylpseudouracil
  modified_base 389: mod_base = OTHER; note = N1-methylpseudouracil
  modified_base 395: mod_base = OTHER; note = N1-methylpseudouracil
  modified_base 400: mod_base = OTHER; note = N1-methylpseudouracil
  modified_base 404: mod_base = OTHER; note = N1-methylpseudouracil
  modified_base 406: mod_base = OTHER; note = N1-methylpseudouracil
  modified_base 423: mod_base = OTHER; note = N1-methylpseudouracil
  modified_base 428: mod_base = OTHER; note = N1-methylpseudouracil
  modified_base 437: mod_base = OTHER; note = N1-methylpseudouracil
  modified_base 440: mod_base = OTHER; note = N1-methylpseudouracil
  modified_base 452: mod_base = OTHER; note = N1-methylpseudouracil
  modified_base 458: mod_base = OTHER; note = N1-methylpseudouracil
  modified_base 463: mod_base = OTHER; note = N1-methylpseudouracil
  modified_base 466: mod_base = OTHER; note = N1-methylpseudouracil
  modified_base 473: mod_base = OTHER; note = N1-methylpseudouracil
  modified_base 485: mod_base = OTHER; note = N1-methylpseudouracil
  modified_base 491: mod_base = OTHER; note = N1-methylpseudouracil
  modified_base 495: mod_base = OTHER; note = N1-methylpseudouracil
  modified_base 500: mod_base = OTHER; note = N1-methylpseudouracil
  modified_base 503: mod_base = OTHER; note = N1-methylpseudouracil
  modified_base 506: mod_base = OTHER; note = N1-methylpseudouracil
  modified_base 508: mod_base = OTHER; note = N1-methylpseudouracil
  modified_base 517: mod_base = OTHER; note = N1-methylpseudouracil
  modified_base 521: mod_base = OTHER; note = N1-methylpseudouracil
  modified_base 524: mod_base = OTHER; note = N1-methylpseudouracil
  modified_base 532: mod_base = OTHER; note = N1-methylpseudouracil
  modified_base 560: mod_base = OTHER; note = N1-methylpseudouracil
  modified_base 565: mod_base = OTHER; note = N1-methylpseudouracil
  modified_base 575: mod_base = OTHER; note = N1-methylpseudouracil
  modified_base 581: mod_base = OTHER; note = N1-methylpseudouracil
  modified_base 584: mod_base = OTHER; note = N1-methylpseudouracil
  modified_base 586: mod_base = OTHER; note = N1-methylpseudouracil
  modified_base 587: mod_base = OTHER; note = N1-methylpseudouracil
  modified_base 589: mod_base = OTHER; note = N1-methylpseudouracil
  modified_base 592: mod_base = OTHER; note = N1-methylpseudouracil
  modified_base 593: mod_base = OTHER; note = N1-methylpseudouracil
  modified_base 607: mod_base = OTHER; note = N1-methylpseudouracil
  modified_base 619: mod_base = OTHER; note = N1-methylpseudouracil
  modified_base 620: mod_base = OTHER; note = N1-methylpseudouracil
  modified_base 622: mod_base = OTHER; note = N1-methylpseudouracil
  modified_base 623: mod_base = OTHER; note = N1-methylpseudouracil
  modified_base 626: mod_base = OTHER; note = N1-methylpseudouracil
  modified_base 629: mod_base = OTHER; note = N1-methylpseudouracil
  modified_base 635: mod_base = OTHER; note = N1-methylpseudouracil
  modified_base 638: mod_base = OTHER; note = N1-methylpseudouracil
  modified_base 641: mod_base = OTHER; note = N1-methylpseudouracil
  modified_base 647: mod_base = OTHER; note = N1-methylpseudouracil
  modified_base 658: mod_base = OTHER; note = N1-methylpseudouracil
  modified_base 660: mod_base = OTHER; note = N1-methylpseudouracil
  modified_base 665: mod_base = OTHER; note = N1-methylpseudouracil
  modified_base 671: mod_base = OTHER; note = N1-methylpseudouracil
  modified_base 674: mod_base = OTHER; note = N1-methylpseudouracil
  modified_base 683: mod_base = OTHER; note = N1-methylpseudouracil
  modified_base 685: mod_base = OTHER; note = N1-methylpseudouracil
  modified_base 686: mod_base = OTHER; note = N1-methylpseudouracil
  modified_base 695: mod_base = OTHER; note = N1-methylpseudouracil
  modified_base 701: mod_base = OTHER; note = N1-methylpseudouracil
  modified_base 719: mod_base = OTHER; note = N1-methylpseudouracil
  modified_base 722: mod_base = OTHER; note = N1-methylpseudouracil
  modified_base 731: mod_base = OTHER; note = N1-methylpseudouracil
  modified_base 734: mod_base = OTHER; note = N1-methylpseudouracil
  modified_base 740: mod_base = OTHER; note = N1-methylpseudouracil
  modified_base 748: mod_base = OTHER; note = N1-methylpseudouracil
  modified_base 752: mod_base = OTHER; note = N1-methylpseudouracil
  modified_base 764: mod_base = OTHER; note = N1-methylpseudouracil
  modified_base 770: mod_base = OTHER; note = N1-methylpseudouracil
  modified_base 772: mod_base = OTHER; note = N1-methylpseudouracil
  modified_base 773: mod_base = OTHER; note = N1-methylpseudouracil
  modified_base 782: mod_base = OTHER; note = N1-methylpseudouracil
  modified_base 794: mod_base = OTHER; note = N1-methylpseudouracil
  modified_base 808: mod_base = OTHER; note = N1-methylpseudouracil
  modified_base 809: mod_base = OTHER; note = N1-methylpseudouracil
  modified_base 811: mod_base = OTHER; note = N1-methylpseudouracil
  modified_base 812: mod_base = OTHER; note = N1-methylpseudouracil
  modified_base 818: mod_base = OTHER; note = N1-methylpseudouracil
  modified_base 821: mod_base = OTHER; note = N1-methylpseudouracil
  modified_base 827: mod_base = OTHER; note = N1-methylpseudouracil
  modified_base 829: mod_base = OTHER; note = N1-methylpseudouracil
  modified_base 833: mod_base = OTHER; note = N1-methylpseudouracil
  modified_base 835: mod_base = OTHER; note = N1-methylpseudouracil
  modified_base 841: mod_base = OTHER; note = N1-methylpseudouracil
  modified_base 852: mod_base = OTHER; note = N1-methylpseudouracil
  modified_base 860: mod_base = OTHER; note = N1-methylpseudouracil
  modified_base 872: mod_base = OTHER; note = N1-methylpseudouracil
  modified_base 875: mod_base = OTHER; note = N1-methylpseudouracil
  modified_base 877: mod_base = OTHER; note = N1-methylpseudouracil
  modified_base 886: mod_base = OTHER; note = N1-methylpseudouracil
  modified_base 887: mod_base = OTHER; note = N1-methylpseudouracil
  modified_base 889: mod_base = OTHER; note = N1-methylpseudouracil
  modified_base 907: mod_base = OTHER; note = N1-methylpseudouracil
  modified_base 908: mod_base = OTHER; note = N1-methylpseudouracil
  modified_base 909: mod_base = OTHER; note = N1-methylpseudouracil
  modified_base 912: mod_base = OTHER; note = N1-methylpseudouracil
  modified_base 918: mod_base = OTHER; note = N1-methylpseudouracil
  modified_base 924: mod_base = OTHER; note = N1-methylpseudouracil
  modified_base 931: mod_base = OTHER; note = N1-methylpseudouracil
  modified_base 938: mod_base = OTHER; note = N1-methylpseudouracil
  modified_base 940: mod_base = OTHER; note = N1-methylpseudouracil
  modified_base 941: mod_base = OTHER; note = N1-methylpseudouracil
  modified_base 946: mod_base = OTHER; note = N1-methylpseudouracil
  modified_base 949: mod_base = OTHER; note = N1-methylpseudouracil
  modified_base 950: mod_base = OTHER; note = N1-methylpseudouracil
  modified_base 956: mod_base = OTHER; note = N1-methylpseudouracil
  modified_base 959: mod_base = OTHER; note = N1-methylpseudouracil
  modified_base 962: mod_base = OTHER; note = N1-methylpseudouracil
  modified_base 968: mod_base = OTHER; note = N1-methylpseudouracil
  modified_base 969: mod_base = OTHER; note = N1-methylpseudouracil
  modified_base 981: mod_base = OTHER; note = N1-methylpseudouracil
  modified_base 996: mod_base = OTHER; note = N1-methylpseudouracil
  modified_base 1003: mod_base = OTHER; note = N1-methylpseudouracil
  modified_base 1004: mod_base = OTHER; note = N1-methylpseudouracil
  modified_base 1007: mod_base = OTHER; note = N1-methylpseudouracil
  modified_base 1016: mod_base = OTHER; note = N1-methylpseudouracil
  modified_base 1024: mod_base = OTHER; note = N1-methylpseudouracil
  modified_base 1028: mod_base = OTHER; note = N1-methylpseudouracil
  modified_base 1048: mod_base = OTHER; note = N1-methylpseudouracil
  modified_base 1049: mod_base = OTHER; note = N1-methylpseudouracil
  modified_base 1052: mod_base = OTHER; note = N1-methylpseudouracil
  modified_base 1054: mod_base = OTHER; note = N1-methylpseudouracil
  modified_base 1057: mod_base = OTHER; note = N1-methylpseudouracil
  modified_base 1061: mod_base = OTHER; note = N1-methylpseudouracil
  modified_base 1075: mod_base = OTHER; note = N1-methylpseudouracil
  modified_base 1079: mod_base = OTHER; note = N1-methylpseudouracil
  modified_base 1087: mod_base = OTHER; note = N1-methylpseudouracil
  modified_base 1088: mod_base = OTHER; note = N1-methylpseudouracil
  modified_base 1091: mod_base = OTHER; note = N1-methylpseudouracil
  modified_base 1094: mod_base = OTHER; note = N1-methylpseudouracil
  modified_base 1096: mod_base = OTHER; note = N1-methylpseudouracil
  modified_base 1115: mod_base = OTHER; note = N1-methylpseudouracil
  modified_base 1126: mod_base = OTHER; note = N1-methylpseudouracil
  modified_base 1135: mod_base = OTHER; note = N1-methylpseudouracil
  modified_base 1139: mod_base = OTHER; note = N1-methylpseudouracil
  modified_base 1148: mod_base = OTHER; note = N1-methylpseudouracil
  modified_base 1151: mod_base = OTHER; note = N1-methylpseudouracil
  modified_base 1153: mod_base = OTHER; note = N1-methylpseudouracil
  modified_base 1157: mod_base = OTHER; note = N1-methylpseudouracil
  modified_base 1165: mod_base = OTHER; note = N1-methylpseudouracil
  modified_base 1172: mod_base = OTHER; note = N1-methylpseudouracil
  modified_base 1178: mod_base = OTHER; note = N1-methylpseudouracil
  modified_base 1181: mod_base = OTHER; note = N1-methylpseudouracil
  modified_base 1189: mod_base = OTHER; note = N1-methylpseudouracil
  modified_base 1193: mod_base = OTHER; note = N1-methylpseudouracil
  modified_base 1196: mod_base = OTHER; note = N1-methylpseudouracil
  modified_base 1199: mod_base = OTHER; note = N1-methylpseudouracil
  modified_base 1246: mod_base = OTHER; note = N1-methylpseudouracil
  modified_base 1253: mod_base = OTHER; note = N1-methylpseudouracil
  modified_base 1260: mod_base = OTHER; note = N1-methylpseudouracil
  modified_base 1278: mod_base = OTHER; note = N1-methylpseudouracil
  modified_base 1283: mod_base = OTHER; note = N1-methylpseudouracil
  modified_base 1286: mod_base = OTHER; note = N1-methylpseudouracil
  modified_base 1291: mod_base = OTHER; note = N1-methylpseudouracil
  modified_base 1292: mod_base = OTHER; note = N1-methylpseudouracil
  modified_base 1295: mod_base = OTHER; note = N1-methylpseudouracil
  modified_base 1304: mod_base = OTHER; note = N1-methylpseudouracil
  modified_base 1328: mod_base = OTHER; note = N1-methylpseudouracil
  modified_base 1331: mod_base = OTHER; note = N1-methylpseudouracil
  modified_base 1352: mod_base = OTHER; note = N1-methylpseudouracil
  modified_base 1359: mod_base = OTHER; note = N1-methylpseudouracil
  modified_base 1364: mod_base = OTHER; note = N1-methylpseudouracil
  modified_base 1367: mod_base = OTHER; note = N1-methylpseudouracil
  modified_base 1373: mod_base = OTHER; note = N1-methylpseudouracil
  modified_base 1378: mod_base = OTHER; note = N1-methylpseudouracil
  modified_base 1384: mod_base = OTHER; note = N1-methylpseudouracil
  modified_base 1388: mod_base = OTHER; note = N1-methylpseudouracil
  modified_base 1390: mod_base = OTHER; note = N1-methylpseudouracil
  modified_base 1395: mod_base = OTHER; note = N1-methylpseudouracil
  modified_base 1402: mod_base = OTHER; note = N1-methylpseudouracil
  modified_base 1406: mod_base = OTHER; note = N1-methylpseudouracil
  modified_base 1411: mod_base = OTHER; note = N1-methylpseudouracil
  modified_base 1415: mod_base = OTHER; note = N1-methylpseudouracil
  modified_base 1416: mod_base = OTHER; note = N1-methylpseudouracil
  modified_base 1418: mod_base = OTHER; note = N1-methylpseudouracil
  modified_base 1419: mod_base = OTHER; note = N1-methylpseudouracil
  modified_base 1425: mod_base = OTHER; note = N1-methylpseudouracil
  modified_base 1426: mod_base = OTHER; note = N1-methylpseudouracil
  modified_base 1432: mod_base = OTHER; note = N1-methylpseudouracil
  modified_base 1445: mod_base = OTHER; note = N1-methylpseudouracil
  modified_base 1448: mod_base = OTHER; note = N1-methylpseudouracil
  modified_base 1453: mod_base = OTHER; note = N1-methylpseudouracil
  modified_base 1454: mod_base = OTHER; note = N1-methylpseudouracil
  modified_base 1457: mod_base = OTHER; note = N1-methylpseudouracil
  modified_base 1465: mod_base = OTHER; note = N1-methylpseudouracil
  modified_base 1473: mod_base = OTHER; note = N1-methylpseudouracil
  modified_base 1476: mod_base = OTHER; note = N1-methylpseudouracil
  modified_base 1478: mod_base = OTHER; note = N1-methylpseudouracil
  modified_base 1479: mod_base = OTHER; note = N1-methylpseudouracil
  modified_base 1480: mod_base = OTHER; note = N1-methylpseudouracil
  modified_base 1484: mod_base = OTHER; note = N1-methylpseudouracil
  modified_base 1489: mod_base = OTHER; note = N1-methylpseudouracil
  modified_base 1491: mod_base = OTHER; note = N1-methylpseudouracil
  modified_base 1495: mod_base = OTHER; note = N1-methylpseudouracil

SEQ ID NO: 302 - RNA, 1502 nt, synthetic construct
  source 1..1502: mol_type = other RNA
  modified_base 6: mod_base = OTHER; note = N1-methylpseudouracil
  modified_base 14: mod_base = OTHER; note = N1-methylpseudouracil
  modified_base 15: mod_base = OTHER; note = N1-methylpseudouracil
  modified_base 16: mod_base = OTHER; note = N1-methylpseudouracil
  modified_base 19: mod_base = OTHER; note = N1-methylpseudouracil
  modified_base 21: mod_base = OTHER; note = N1-methylpseudouracil
  modified_base 22: mod_base = OTHER; note = N1-methylpseudouracil
  modified_base 27: mod_base = OTHER; note = N1-methylpseudouracil
  modified_base 28: mod_base = OTHER; note = N1-methylpseudouracil
  modified_base 32: mod_base = OTHER; note = N1-methylpseudouracil
  modified_base 33: mod_base = OTHER; note = N1-methylpseudouracil
  modified_base 34: mod_base = OTHER; note = N1-methylpseudouracil
  modified_base 36: mod_base = OTHER; note = N1-methylpseudouracil
  modified_base 37: mod_base = OTHER; note = N1-methylpseudouracil
  modified_base 38: mod_base = OTHER; note = N1-methylpseudouracil
  modified_base 39: mod_base = OTHER; note = N1-methylpseudouracil
  modified_base 42: mod_base = OTHER; note = N1-methylpseudouracil
  modified_base 43: mod_base = OTHER; note = N1-methylpseudouracil
  modified_base 44: mod_base = OTHER; note = N1-methylpseudouracil
  modified_base 45: mod_base = OTHER; note = N1-methylpseudouracil
  modified_base 47: mod_base = OTHER; note = N1-methylpseudouracil
  modified_base 54: mod_base = OTHER; note = N1-methylpseudouracil
  modified_base 62: mod_base = OTHER; note = N1-methylpseudouracil
  modified_base 63: mod_base = OTHER; note = N1-methylpseudouracil
  modified_base 64: mod_base = OTHER; note = N1-methylpseudouracil
  modified_base 65: mod_base = OTHER; note = N1-methylpseudouracil
  modified_base 66: mod_base = OTHER; note = N1-methylpseudouracil
  modified_base 68: mod_base = OTHER; note = N1-methylpseudouracil
  modified_base 69: mod_base = OTHER; note = N1-methylpseudouracil
  modified_base 71: mod_base = OTHER; note = N1-methylpseudouracil
  modified_base 77: mod_base = OTHER; note = N1-methylpseudouracil
  modified_base 82: mod_base = OTHER; note = N1-methylpseudouracil
  modified_base 85: mod_base = OTHER; note = N1-methylpseudouracil
  modified_base 91: mod_base = OTHER; note = N1-methylpseudouracil
  modified_base 105: mod_base = OTHER; note = N1-methylpseudouracil
  modified_base 108: mod_base = OTHER; note = N1-methylpseudouracil
  modified_base 111: mod_base = OTHER; note = N1-methylpseudouracil
  modified_base 133: mod_base = OTHER; note = N1-methylpseudouracil
  modified_base 146: mod_base = OTHER; note = N1-methylpseudouracil
  modified_base 157: mod_base = OTHER; note = N1-methylpseudouracil
  modified_base 164: mod_base = OTHER; note = N1-methylpseudouracil
  modified_base 175: mod_base = OTHER; note = N1-methylpseudouracil
  modified_base 182: mod_base = OTHER; note = N1-methylpseudouracil
  modified_base 194: mod_base = OTHER; note = N1-methylpseudouracil
  modified_base 199: mod_base = OTHER; note = N1-methylpseudouracil
  modified_base 200: mod_base = OTHER; note = N1-methylpseudouracil
  modified_base 206: mod_base = OTHER; note = N1-methylpseudouracil
  modified_base 227: mod_base = OTHER; note = N1-methylpseudouracil
  modified_base 235: mod_base = OTHER; note = N1-methylpseudouracil
  modified_base 236: mod_base = OTHER; note = N1-methylpseudouracil
  modified_base 238: mod_base = OTHER; note = N1-methylpseudouracil
  modified_base 247: mod_base = OTHER; note = N1-methylpseudouracil
  modified_base 251: mod_base = OTHER; note = N1-methylpseudouracil
  modified_base 253: mod_base = OTHER; note = N1-methylpseudouracil
  modified_base 254: mod_base = OTHER; note = N1-methylpseudouracil
  modified_base 257: mod_base = OTHER; note = N1-methylpseudouracil
  modified_base 269: mod_base = OTHER; note = N1-methylpseudouracil
  modified_base 278: mod_base = OTHER; note = N1-methylpseudouracil
  modified_base 281: mod_base = OTHER; note = N1-methylpseudouracil
  modified_base 296: mod_base = OTHER; note = N1-methylpseudouracil
  modified_base 308: mod_base = OTHER; note = N1-methylpseudouracil
  modified_base 317: mod_base = OTHER; note = N1-methylpseudouracil
  modified_base 323: mod_base = OTHER; note = N1-methylpseudouracil
  modified_base 326: mod_base = OTHER; note = N1-methylpseudouracil
  modified_base 332: mod_base = OTHER; note = N1-methylpseudouracil
  modified_base 341: mod_base = OTHER; note = N1-methylpseudouracil
  modified_base 355: mod_base = OTHER; note = N1-methylpseudouracil
  modified_base 364: mod_base = OTHER; note = N1-methylpseudouracil
  modified_base 365: mod_base = OTHER; note = N1-methylpseudouracil
  modified_base 369: mod_base = OTHER; note = N1-methylpseudouracil
  modified_base 374: mod_base = OTHER; note = N1-methylpseudouracil
  modified_base 377: mod_base = OTHER; note = N1-methylpseudouracil
  modified_base 380: mod_base = OTHER; note = N1-methylpseudouracil
  modified_base 385: mod_base = OTHER; note = N1-methylpseudouracil
  modified_base 389: mod_base = OTHER; note = N1-methylpseudouracil
  modified_base 395: mod_base = OTHER; note = N1-methylpseudouracil
  modified_base 400: mod_base = OTHER; note = N1-methylpseudouracil
  modified_base 404: mod_base = OTHER; note = N1-methylpseudouracil
  modified_base 406: mod_base = OTHER; note = N1-methylpseudouracil
  modified_base 423: mod_base = OTHER; note = N1-methylpseudouracil
  modified_base 428: mod_base = OTHER; note = N1-methylpseudouracil
  modified_base 437: mod_base = OTHER; note = N1-methylpseudouracil
  modified_base 440: mod_base = OTHER; note = N1-methylpseudouracil
  modified_base 452: mod_base = OTHER; note = N1-methylpseudouracil
  modified_base 458: mod_base = OTHER; note = N1-methylpseudouracil
  modified_base 463: mod_base = OTHER; note = N1-methylpseudouracil
  modified_base 466: mod_base = OTHER; note = N1-methylpseudouracil
  modified_base 473: mod_base = OTHER; note = N1-methylpseudouracil
  modified_base 485: mod_base = OTHER; note = N1-methylpseudouracil
  modified_base 491: mod_base = OTHER; note = N1-methylpseudouracil
  modified_base 495: mod_base = OTHER; note = N1-methylpseudouracil
  modified_base 500: mod_base = OTHER; note = N1-methylpseudouracil
  modified_base 503: mod_base = OTHER; note = N1-methylpseudouracil
  modified_base 506: mod_base = OTHER; note = N1-methylpseudouracil
  modified_base 508: mod_base = OTHER; note = N1-methylpseudouracil
  modified_base 517: mod_base = OTHER; note = N1-methylpseudouracil
  modified_base 521: mod_base = OTHER; note = N1-methylpseudouracil
  modified_base 524: mod_base = OTHER; note = N1-methylpseudouracil
  modified_base 532: mod_base = OTHER; note = N1-methylpseudouracil
  modified_base 560: mod_base = OTHER; note = N1-methylpseudouracil
  modified_base 565: mod_base = OTHER; note = N1-methylpseudouracil
  modified_base 575: mod_base = OTHER; note = N1-methylpseudouracil
  modified_base 581: mod_base = OTHER; note = N1-methylpseudouracil
  modified_base 584: mod_base = OTHER; note = N1-methylpseudouracil
  modified_base 586: mod_base = OTHER; note = N1-methylpseudouracil
  modified_base 587: mod_base = OTHER; note = N1-methylpseudouracil
  modified_base 589: mod_base = OTHER; note = N1-methylpseudouracil
  modified_base 592: mod_base = OTHER; note = N1-methylpseudouracil
  modified_base 593: mod_base = OTHER; note = N1-methylpseudouracil
  modified_base 607: mod_base = OTHER; note = N1-methylpseudouracil
  modified_base 619: mod_base = OTHER; note = N1-methylpseudouracil
  modified_base 620: mod_base = OTHER; note = N1-methylpseudouracil
  modified_base 622: mod_base = OTHER; note = N1-methylpseudouracil
  modified_base 623: mod_base = OTHER; note = N1-methylpseudouracil
  modified_base 626: mod_base = OTHER; note = N1-methylpseudouracil
  modified_base 629: mod_base = OTHER; note = N1-methylpseudouracil
  modified_base 635: mod_base = OTHER; note = N1-methylpseudouracil
  modified_base 638: mod_base = OTHER; note = N1-methylpseudouracil
  modified_base 641: mod_base = OTHER; note = N1-methylpseudouracil
  modified_base 647: mod_base = OTHER; note = N1-methylpseudouracil
  modified_base 658: mod_base = OTHER; note = N1-methylpseudouracil
  modified_base 660: mod_base = OTHER; note = N1-methylpseudouracil
  modified_base 665: mod_base = OTHER; note = N1-methylpseudouracil
  modified_base 671: mod_base = OTHER; note = N1-methylpseudouracil
  modified_base 674: mod_base = OTHER; note = N1-methylpseudouracil
  modified_base 683: mod_base = OTHER; note = N1-methylpseudouracil
  modified_base 685: mod_base = OTHER; note = N1-methylpseudouracil
  modified_base 686: mod_base = OTHER; note = N1-methylpseudouracil
  modified_base 695: mod_base = OTHER; note = N1-methylpseudouracil
  modified_base 701: mod_base = OTHER; note = N1-methylpseudouracil
  modified_base 719: mod_base = OTHER; note = N1-methylpseudouracil
  modified_base 722: mod_base = OTHER; note = N1-methylpseudouracil
  modified_base 731: mod_base = OTHER; note = N1-methylpseudouracil
  modified_base 734: mod_base = OTHER; note = N1-methylpseudouracil
  modified_base 740: mod_base = OTHER; note = N1-methylpseudouracil
  modified_base 748: mod_base = OTHER; note = N1-methylpseudouracil
  modified_base 752: mod_base = OTHER; note = N1-methylpseudouracil
  modified_base 764: mod_base = OTHER; note = N1-methylpseudouracil
  modified_base 770: mod_base = OTHER; note = N1-methylpseudouracil
  modified_base 772: mod_base = OTHER; note = N1-methylpseudouracil
  modified_base 773: mod_base = OTHER; note = N1-methylpseudouracil
  modified_base 782: mod_base = OTHER; note = N1-methylpseudouracil
  modified_base 794: mod_base = OTHER; note = N1-methylpseudouracil
  modified_base 808: mod_base = OTHER; note = N1-methylpseudouracil
  modified_base 809: mod_base = OTHER; note = N1-methylpseudouracil
  modified_base 811: mod_base = OTHER; note = N1-methylpseudouracil
  modified_base 812: mod_base = OTHER; note = N1-methylpseudouracil
  modified_base 818: mod_base = OTHER; note = N1-methylpseudouracil
  modified_base 821: mod_base = OTHER; note = N1-methylpseudouracil
  modified_base 827: mod_base = OTHER; note = N1-methylpseudouracil
  modified_base 829: mod_base = OTHER; note = N1-methylpseudouracil
  modified_base 833: mod_base = OTHER; note = N1-methylpseudouracil
  modified_base 835: mod_base = OTHER; note = N1-methylpseudouracil
  modified_base 841: mod_base = OTHER; note = N1-methylpseudouracil
  modified_base 852: mod_base = OTHER; note = N1-methylpseudouracil
  modified_base 860: mod_base = OTHER; note = N1-methylpseudouracil
  modified_base 872: mod_base = OTHER; note = N1-methylpseudouracil
  modified_base 875: mod_base = OTHER; note = N1-methylpseudouracil
  modified_base 877: mod_base = OTHER; note = N1-methylpseudouracil
  modified_base 886: mod_base = OTHER; note = N1-methylpseudouracil
  modified_base 887: mod_base = OTHER; note = N1-methylpseudouracil
  modified_base 889: mod_base = OTHER; note = N1-methylpseudouracil
  modified_base 907: mod_base = OTHER; note = N1-methylpseudouracil
  modified_base 908: mod_base = OTHER; note = N1-methylpseudouracil
  modified_base 909: mod_base = OTHER; note = N1-methylpseudouracil
  modified_base 912: mod_base = OTHER; note = N1-methylpseudouracil
  modified_base 918: mod_base = OTHER; note = N1-methylpseudouracil
  modified_base 924: mod_base = OTHER; note = N1-methylpseudouracil
  modified_base 931: mod_base = OTHER; note = N1-methylpseudouracil
  modified_base 938: mod_base = OTHER; note = N1-methylpseudouracil
  modified_base 940: mod_base = OTHER; note = N1-methylpseudouracil
  modified_base 941: mod_base = OTHER; note = N1-methylpseudouracil
  modified_base 946: mod_base = OTHER; note = N1-methylpseudouracil
  modified_base 949: mod_base = OTHER; note = N1-methylpseudouracil
  modified_base 950: mod_base = OTHER; note = N1-methylpseudouracil
  modified_base 956: mod_base = OTHER; note = N1-methylpseudouracil
  modified_base 959: mod_base = OTHER; note = N1-methylpseudouracil
  modified_base 962: mod_base = OTHER; note = N1-methylpseudouracil
  modified_base 968: mod_base = OTHER; note = N1-methylpseudouracil
  modified_base 969: mod_base = OTHER; note = N1-methylpseudouracil
  modified_base 981: mod_base = OTHER; note = N1-methylpseudouracil
  modified_base 996: mod_base = OTHER; note = N1-methylpseudouracil
  modified_base 1003: mod_base = OTHER; note = N1-methylpseudouracil
  modified_base 1004: mod_base = OTHER; note = N1-methylpseudouracil
  modified_base 1007: mod_base = OTHER; note = N1-methylpseudouracil
  modified_base 1016: mod_base = OTHER; note = N1-methylpseudouracil
  modified_base 1024: mod_base = OTHER; note = N1-methylpseudouracil
  modified_base 1028: mod_base = OTHER; note = N1-methylpseudouracil
  modified_base 1048: mod_base = OTHER; note = N1-methylpseudouracil
  modified_base 1049: mod_base = OTHER; note = N1-methylpseudouracil
  modified_base 1052: mod_base = OTHER; note = N1-methylpseudouracil
  modified_base 1054: mod_base = OTHER; note = N1-methylpseudouracil
  modified_base 1057: mod_base = OTHER; note = N1-methylpseudouracil
  modified_base 1061: mod_base = OTHER; note = N1-methylpseudouracil
  modified_base 1075: mod_base = OTHER; note = N1-methylpseudouracil
  modified_base 1079: mod_base = OTHER; note = N1-methylpseudouracil
  modified_base 1087: mod_base = OTHER; note = N1-methylpseudouracil
  modified_base 1088: mod_base = OTHER; note = N1-methylpseudouracil
  modified_base 1091: mod_base = OTHER; note = N1-methylpseudouracil
  modified_base 1094: mod_base = OTHER; note = N1-methylpseudouracil
  modified_base 1096: mod_base = OTHER; note = N1-methylpseudouracil
  modified_base 1115: mod_base = OTHER; note = N1-methylpseudouracil
  modified_base 1126: mod_base = OTHER; note = N1-methylpseudouracil
  modified_base 1135: mod_base = OTHER; note = N1-methylpseudouracil
  modified_base 1139: mod_base = OTHER; note = N1-methylpseudouracil
  modified_base 1148: mod_base = OTHER; note = N1-methylpseudouracil
  modified_base 1151: mod_base = OTHER; note = N1-methylpseudouracil
  modified_base 1153: mod_base = OTHER; note = N1-methylpseudouracil
  modified_base 1157: mod_base = OTHER; note = N1-methylpseudouracil
  modified_base 1165: mod_base = OTHER; note = N1-methylpseudouracil
  modified_base 1172: mod_base = OTHER; note = N1-methylpseudouracil
  modified_base 1178: mod_base = OTHER; note = N1-methylpseudouracil
  modified_base 1181: mod_base = OTHER; note = N1-methylpseudouracil
  modified_base 1189: mod_base = OTHER; note = N1-methylpseudouracil
  modified_base 1193: mod_base = OTHER; note = N1-methylpseudouracil
  modified_base 1196: mod_base = OTHER; note = N1-methylpseudouracil
  modified_base 1199: mod_base = OTHER; note = N1-methylpseudouracil
  modified_base 1246: mod_base = OTHER; note = N1-methylpseudouracil
  modified_base 1253: mod_base = OTHER; note = N1-methylpseudouracil
  modified_base 1260: mod_base = OTHER; note = N1-methylpseudouracil
  modified_base 1278: mod_base = OTHER; note = N1-methylpseudouracil
  modified_base 1283: mod_base = OTHER; note = N1-methylpseudouracil
  modified_base 1286: mod_base = OTHER; note = N1-methylpseudouracil
  modified_base 1291: mod_base = OTHER; note = N1-methylpseudouracil
  modified_base 1292: mod_base = OTHER; note = N1-methylpseudouracil
  modified_base 1295: mod_base = OTHER; note = N1-methylpseudouracil
  modified_base 1304: mod_base = OTHER; note = N1-methylpseudouracil
  modified_base 1328: mod_base = OTHER; note = N1-methylpseudouracil
  modified_base 1331: mod_base = OTHER; note = N1-methylpseudouracil
  modified_base 1352: mod_base = OTHER; note = N1-methylpseudouracil
  modified_base 1359: mod_base = OTHER; note = N1-methylpseudouracil
  modified_base 1364: mod_base = OTHER; note = N1-methylpseudouracil
  modified_base 1367: mod_base = OTHER; note = N1-methylpseudouracil
  modified_base 1373: mod_base = OTHER; note = N1-methylpseudouracil
  modified_base 1378: mod_base = OTHER; note = N1-methylpseudouracil
  modified_base 1384: mod_base = OTHER; note = N1-methylpseudouracil
  modified_base 1392: mod_base = OTHER; note = N1-methylpseudouracil
  modified_base 1402: mod_base = OTHER; note = N1-methylpseudouracil
  modified_base 1406: mod_base = OTHER; note = N1-methylpseudouracil
  modified_base 1411: mod_base = OTHER; note = N1-methylpseudouracil
  modified_base 1415: mod_base = OTHER; note = N1-methylpseudouracil
  modified_base 1416: mod_base = OTHER; note = N1-methylpseudouracil
  modified_base 1418: mod_base = OTHER; note = N1-methylpseudouracil
  modified_base 1419: mod_base = OTHER; note = N1-methylpseudouracil
  modified_base 1425: mod_base = OTHER; note = N1-methylpseudouracil
  modified_base 1426: mod_base = OTHER; note = N1-methylpseudouracil
  modified_base 1432: mod_base = OTHER; note = N1-methylpseudouracil
  modified_base 1445: mod_base = OTHER; note = N1-methylpseudouracil
  modified_base 1448: mod_base = OTHER; note = N1-methylpseudouracil
  modified_base 1453: mod_base = OTHER; note = N1-methylpseudouracil
  modified_base 1454: mod_base = OTHER; note = N1-methylpseudouracil
  modified_base 1457: mod_base = OTHER; note = N1-methylpseudouracil
  modified_base 1465: mod_base = OTHER; note = N1-methylpseudouracil
  modified_base 1473: mod_base = OTHER; note = N1-methylpseudouracil
  modified_base 1476: mod_base = OTHER; note = N1-methylpseudouracil
  modified_base 1478: mod_base = OTHER; note = N1-methylpseudouracil
  modified_base 1479: mod_base = OTHER; note = N1-methylpseudouracil
  modified_base 1480: mod_base = OTHER; note = N1-methylpseudouracil
  modified_base 1484: mod_base = OTHER; note = N1-methylpseudouracil
  modified_base 1489: mod_base = OTHER; note = N1-methylpseudouracil
  modified_base 1491: mod_base = OTHER; note = N1-methylpseudouracil
  modified_base 1495: mod_base = OTHER; note = N1-methylpseudouracil
ggaaatcgcaaaatttgctcttcgcgttagatttcttttagttttctcgcaactagcaagctttttgttctcgccatggggtcgtcgaagtcgaagccgaaagatcctagtcagcgcaggaggggaggaggatccgcccacgccatggagaacagctggaccatcagcaaggagtaccacatcgacgaggaggtgggcttcgccctgcccaacccacaggagaacctgcccgacttctacaacgactggatgttcatcgccaagcacctgcccgacctgatcgagagcgggcagctgcgggaacgggtggagaagctgaacatgctgagcatcgaccacctgaccgaccacaagtcccagcggttggctcggctggtgctgggctgcatcaccatggcctacgtgtggggaaaggggcacggtgacgtgcggaaggtgctgccccgcaacatcgccgtgccctactgccagctgagcaagaagctggagctgcctccgatcctggtgtacgccgactgcgtgctggccaactggaagaagaaggaccccaacaagcccctgacctacgagaacatggacgtgctgttctccttccgggacggggactgcagcaaggggttcttcctggtgagcctgctggtggagatcgccgccgcctctgccatcaaggtgatccccaccgtgttcaaggccatgcagatgcaggagagggacaccctgctgaaggccctgctggagatcgccagctgcctggagaaggccctgcaggtgttccaccagatccacgaccacgtgaaccccaaggccttcttcagcgtgctgcgcatctacctgtccggctggaagggcaatccccagctgagcgacggcctggtgtacgagggcttctgggaggaccccaaggaatttgctggcggtagcgctggccagtccagcgtgttccagtgcttcgacgtgctgctgggcattcagcaaaccgctggaggcggacacgctgcccagttcctgcaggacatgcggcggtacatgccaccggcccaccgcaacttcctgtgctccctggagagcaacccctccgtgcgggagttcgtgctgtccaagggcgacgccggactgagggaggcctacgacgcctgcgtgaaggccctggtgtccctgcgcagctaccacctgcagatcgtgaccaagtacatcctgatccccgcaagccagcagcccaaggagaacaagaccagcgaggacccctccaagctggaagctaagggcaccggcggcactgacctgatgaacttcctgaagaccgtgcggagcaccaccgagaagagcctgctgaaggagggcgggaagccgatcccgaatcccctcctcgggctcgactcgacgtaagcccctccgggggcctcggtggcctagcttcttgccccttgggcctccccccagcccctcctccccttcctgcacccgtacccccgtggtctttgaataaagtctgagtgggcggc

SEQ ID NO: 303 - RNA, 1502 nt, synthetic construct; identical to SEQ ID NO: 302
  source 1..1502: mol_type = other RNA
  modified_base 6: mod_base = OTHER; note = N1-methylpseudouracil
  modified_base 14: mod_base = OTHER; note = N1-methylpseudouracil
  modified_base 15: mod_base = OTHER; note = N1-methylpseudouracil
  modified_base 16: mod_base = OTHER; note = N1-methylpseudouracil
  modified_base 19: mod_base = OTHER; note = N1-methylpseudouracil
  modified_base 21: mod_base = OTHER; note = N1-methylpseudouracil
  modified_base 22: mod_base = OTHER; note = N1-methylpseudouracil
  modified_base 27: mod_base = OTHER; note = N1-methylpseudouracil
  modified_base 28: mod_base = OTHER; note = N1-methylpseudouracil
  modified_base 32: mod_base = OTHER; note = N1-methylpseudouracil
  modified_base 33: mod_base = OTHER; note = N1-methylpseudouracil
  modified_base 34: mod_base = OTHER; note = N1-methylpseudouracil
  modified_base 36: mod_base = OTHER; note = N1-methylpseudouracil
  modified_base 37: mod_base = OTHER; note = N1-methylpseudouracil
  modified_base 38: mod_base = OTHER; note = N1-methylpseudouracil
  modified_base 39: mod_base = OTHER; note = N1-methylpseudouracil
  modified_base 42: mod_base = OTHER; note = N1-methylpseudouracil
  modified_base 43: mod_base = OTHER; note = N1-methylpseudouracil
  modified_base 44: mod_base = OTHER; note = N1-methylpseudouracil
  modified_base 45: mod_base = OTHER; note = N1-methylpseudouracil
  modified_base 47: mod_base = OTHER; note = N1-methylpseudouracil
  modified_base 54: mod_base = OTHER; note = N1-methylpseudouracil
  modified_base 62: mod_base = OTHER; note = N1-methylpseudouracil
  modified_base 63: mod_base = OTHER; note = N1-methylpseudouracil
  modified_base 64: mod_base = OTHER; note = N1-methylpseudouracil
  modified_base 65: mod_base = OTHER; note = N1-methylpseudouracil
  modified_base 66: mod_base = OTHER; note = N1-methylpseudouracil
  modified_base 68: mod_base = OTHER; note = N1-methylpseudouracil
  modified_base 69: mod_base = OTHER; note = N1-methylpseudouracil
  modified_base 71: mod_base = OTHER; note = N1-methylpseudouracil
  modified_base 77: mod_base = OTHER; note = N1-methylpseudouracil
  modified_base 82: mod_base = OTHER; note = N1-methylpseudouracil
  modified_base 85: mod_base = OTHER; note = N1-methylpseudouracil
  modified_base 91: mod_base = OTHER; note = N1-methylpseudouracil
  modified_base 105: mod_base = OTHER; note = N1-methylpseudouracil
  modified_base 108: mod_base = OTHER; note = N1-methylpseudouracil
  modified_base 111: mod_base = OTHER; note = N1-methylpseudouracil
  modified_base 133: mod_base = OTHER; note = N1-methylpseudouracil
  modified_base 146: mod_base = OTHER; note = N1-methylpseudouracil
  modified_base 157: mod_base = OTHER; note = N1-methylpseudouracil
  modified_base 164: mod_base = OTHER; note = N1-methylpseudouracil
  modified_base 175: mod_base = OTHER; note = N1-methylpseudouracil
  modified_base 182: mod_base = OTHER; note = N1-methylpseudouracil
  modified_base 194: mod_base = OTHER; note = N1-methylpseudouracil
  modified_base 199: mod_base = OTHER; note = N1-methylpseudouracil
  modified_base 200: mod_base = OTHER; note = N1-methylpseudouracil
  modified_base 206: mod_base = OTHER; note = N1-methylpseudouracil
  modified_base 227: mod_base = OTHER; note = N1-methylpseudouracil
  modified_base 235: mod_base = OTHER; note = N1-methylpseudouracil
  modified_base 236: mod_base = OTHER; note = N1-methylpseudouracil
  modified_base 238: mod_base = OTHER; note = N1-methylpseudouracil
  modified_base 247: mod_base = OTHER; note = N1-methylpseudouracil
  modified_base 251: mod_base = OTHER; note = N1-methylpseudouracil
  modified_base 253: mod_base = OTHER; note = N1-methylpseudouracil
  modified_base 254: mod_base = OTHER; note = N1-methylpseudouracil
  modified_base 257: mod_base = OTHER; note = N1-methylpseudouracil
  modified_base 269: mod_base = OTHER; note = N1-methylpseudouracil
  modified_base 278: mod_base = OTHER; note = N1-methylpseudouracil
  modified_base 281: mod_base = OTHER; note = N1-methylpseudouracil
  modified_base 296: mod_base = OTHER; note = N1-methylpseudouracil
  modified_base 308: mod_base = OTHER; note = N1-methylpseudouracil
  modified_base 317: mod_base = OTHER; note = N1-methylpseudouracil
  modified_base 323: mod_base = OTHER; note = N1-methylpseudouracil
  modified_base 326: mod_base = OTHER; note = N1-methylpseudouracil
  modified_base 332: mod_base = OTHER; note = N1-methylpseudouracil
  modified_base 341: mod_base = OTHER; note = N1-methylpseudouracil
  modified_base 355: mod_base = OTHER; note = N1-methylpseudouracil
  modified_base 364: mod_base = OTHER; note = N1-methylpseudouracil
  modified_base 365: mod_base = OTHER; note = N1-methylpseudouracil
  modified_base 369: mod_base = OTHER; note = N1-methylpseudouracil
  modified_base 374: mod_base = OTHER; note = N1-methylpseudouracil
  modified_base 377: mod_base = OTHER; note = N1-methylpseudouracil
  modified_base 380: mod_base = OTHER; note = N1-methylpseudouracil
  modified_base 385: mod_base = OTHER; note = N1-methylpseudouracil
  modified_base 389: mod_base = OTHER; note = N1-methylpseudouracil
  modified_base 395: mod_base = OTHER; note = N1-methylpseudouracil
  modified_base 400: mod_base = OTHER; note = N1-methylpseudouracil
  modified_base 404: mod_base = OTHER; note = N1-methylpseudouracil
  modified_base 406: mod_base = OTHER; note = N1-methylpseudouracil
  modified_base 423: mod_base = OTHER; note = N1-methylpseudouracil
  modified_base 428: mod_base = OTHER; note = N1-methylpseudouracil
  modified_base 437: mod_base = OTHER; note = N1-methylpseudouracil
  modified_base 440: mod_base = OTHER; note = N1-methylpseudouracil
  modified_base 452: mod_base = OTHER; note = N1-methylpseudouracil
  modified_base 458: mod_base = OTHER; note = N1-methylpseudouracil
  modified_base 463: mod_base = OTHER; note = N1-methylpseudouracil
  modified_base 466: mod_base = OTHER; note = N1-methylpseudouracil
  modified_base 473: mod_base = OTHER; note = N1-methylpseudouracil
  modified_base 485: mod_base = OTHER; note = N1-methylpseudouracil
  modified_base 491: mod_base = OTHER; note = N1-methylpseudouracil
  modified_base 495: mod_base = OTHER; note = N1-methylpseudouracil
  modified_base 500: mod_base = OTHER; note = N1-methylpseudouracil
  modified_base 503: mod_base = OTHER; note = N1-methylpseudouracil
  modified_base 506: mod_base = OTHER; note = N1-methylpseudouracil
  modified_base 508: mod_base = OTHER; note = N1-methylpseudouracil
  modified_base 517: mod_base = OTHER; note = N1-methylpseudouracil
  modified_base 521: mod_base = OTHER; note = N1-methylpseudouracil
  modified_base 524: mod_base = OTHER; note = N1-methylpseudouracil
  modified_base 532: mod_base = OTHER; note = N1-methylpseudouracil
  modified_base 560: mod_base = OTHER; note = N1-methylpseudouracil
  modified_base 565: mod_base = OTHER; note = N1-methylpseudouracil
  modified_base 575: mod_base = OTHER; note = N1-methylpseudouracil
  modified_base 581: mod_base = OTHER; note = N1-methylpseudouracil
  modified_base 584: mod_base = OTHER; note = N1-methylpseudouracil
  modified_base 586: mod_base = OTHER; note = N1-methylpseudouracil
  modified_base 587: mod_base = OTHER; note = N1-methylpseudouracil
  modified_base 589: mod_base = OTHER; note = N1-methylpseudouracil
  modified_base 592: mod_base = OTHER; note = N1-methylpseudouracil
  modified_base 593: mod_base = OTHER; note = N1-methylpseudouracil
  modified_base 607: mod_base = OTHER; note = N1-methylpseudouracil
  modified_base 619: mod_base = OTHER; note = N1-methylpseudouracil
  modified_base 620: mod_base = OTHER; note = N1-methylpseudouracil
  modified_base 622: mod_base = OTHER; note = N1-methylpseudouracil
  modified_base 623: mod_base = OTHER; note = N1-methylpseudouracil
  modified_base 626: mod_base = OTHER; note = N1-methylpseudouracil
  modified_base 629: mod_base = OTHER; note = N1-methylpseudouracil
  modified_base 635: mod_base = OTHER; note = N1-methylpseudouracil
  modified_base 638: mod_base = OTHER; note = N1-methylpseudouracil
  modified_base 641: mod_base = OTHER; note = N1-methylpseudouracil
  modified_base 647: mod_base = OTHER; note = N1-methylpseudouracil
  modified_base 658: mod_base = OTHER; note = N1-methylpseudouracil
  modified_base 660: mod_base = OTHER; note = N1-methylpseudouracil
  modified_base 665: mod_base = OTHER; note = N1-methylpseudouracil
  modified_base 671: mod_base = OTHER; note = N1-methylpseudouracil
  modified_base 674: mod_base = OTHER; note = N1-methylpseudouracil
  modified_base 683: mod_base = OTHER; note = N1-methylpseudouracil
  modified_base 685: mod_base = OTHER; note = N1-methylpseudouracil
  modified_base 686: mod_base = OTHER; note = N1-methylpseudouracil
  modified_base 695: mod_base = OTHER; note = N1-methylpseudouracil
  modified_base 701: mod_base = OTHER; note = N1-methylpseudouracil
  modified_base 719: mod_base = OTHER; note = N1-methylpseudouracil
  modified_base 722: mod_base = OTHER; note = N1-methylpseudouracil
  modified_base 731: mod_base = OTHER; note = N1-methylpseudouracil
  modified_base 734: mod_base = OTHER; note = N1-methylpseudouracil
  modified_base 740: mod_base = OTHER; note = N1-methylpseudouracil
  modified_base 748: mod_base = OTHER; note = N1-methylpseudouracil
  modified_base 752: mod_base = OTHER; note = N1-methylpseudouracil
  modified_base 764: mod_base = OTHER; note = N1-methylpseudouracil
  modified_base 770: mod_base = OTHER; note = N1-methylpseudouracil
  modified_base 772: mod_base = OTHER; note = N1-methylpseudouracil
  modified_base 773: mod_base = OTHER; note = N1-methylpseudouracil
  modified_base 782: mod_base = OTHER; note = N1-methylpseudouracil
  modified_base 794: mod_base = OTHER; note = N1-methylpseudouracil
  modified_base 808: mod_base = OTHER; note = N1-methylpseudouracil
  modified_base 809: mod_base = OTHER; note = N1-methylpseudouracil
  modified_base 811: mod_base = OTHER; note = N1-methylpseudouracil
  modified_base 812: mod_base = OTHER; note = N1-methylpseudouracil
  modified_base 818: mod_base = OTHER; note = N1-methylpseudouracil
  modified_base 821: mod_base = OTHER; note = N1-methylpseudouracil
  modified_base 827: mod_base = OTHER; note = N1-methylpseudouracil
  modified_base 829: mod_base = OTHER; note = N1-methylpseudouracil
  modified_base 833: mod_base = OTHER; note = N1-methylpseudouracil
  modified_base 835: mod_base = OTHER; note = N1-methylpseudouracil
  modified_base 841: mod_base = OTHER; note = N1-methylpseudouracil
  modified_base 852: mod_base = OTHER; note = N1-methylpseudouracil
  modified_base 860: mod_base = OTHER; note = N1-methylpseudouracil
  modified_base 872: mod_base = OTHER; note = N1-methylpseudouracil
  modified_base 875: mod_base = OTHER; note = N1-methylpseudouracil
  modified_base 877: mod_base = OTHER; note = N1-methylpseudouracil
  modified_base 886: mod_base = OTHER; note = N1-methylpseudouracil
  modified_base 887: mod_base = OTHER; note = N1-methylpseudouracil
  modified_base 889: mod_base = OTHER; note = N1-methylpseudouracil
  modified_base 907: mod_base = OTHER; note = N1-methylpseudouracil
  modified_base 908: mod_base = OTHER; note = N1-methylpseudouracil
  modified_base 909: mod_base = OTHER; note = N1-methylpseudouracil
  modified_base 912: mod_base = OTHER; note = N1-methylpseudouracil
  modified_base 918: mod_base = OTHER; note = N1-methylpseudouracil
  modified_base 924: mod_base = OTHER; note = N1-methylpseudouracil
  modified_base 931: mod_base = OTHER; note = N1-methylpseudouracil
  modified_base 938: mod_base = OTHER; note = N1-methylpseudouracil
  modified_base 940: mod_base = OTHER; note = N1-methylpseudouracil
  modified_base 941: mod_base = OTHER; note = N1-methylpseudouracil
  modified_base 946: mod_base = OTHER; note = N1-methylpseudouracil
  modified_base 949: mod_base = OTHER; note = N1-methylpseudouracil
  modified_base 950: mod_base = OTHER; note = N1-methylpseudouracil
  modified_base 956: mod_base = OTHER; note = N1-methylpseudouracil
  modified_base 959: mod_base = OTHER; note = N1-methylpseudouracil
  modified_base 962: mod_base = OTHER; note = N1-methylpseudouracil
  modified_base 968: mod_base = OTHER; note = N1-methylpseudouracil
  modified_base 969: mod_base = OTHER; note = N1-methylpseudouracil
  modified_base 981: mod_base = OTHER; note = N1-methylpseudouracil
  modified_base 996: mod_base = OTHER; note = N1-methylpseudouracil
  modified_base 1003: mod_base = OTHER; note = N1-methylpseudouracil
  modified_base 1004: mod_base = OTHER; note = N1-methylpseudouracil
  modified_base 1007: mod_base = OTHER; note = N1-methylpseudouracil
  modified_base 1016: mod_base = OTHER; note = N1-methylpseudouracil
  modified_base 1024: mod_base = OTHER; note = N1-methylpseudouracil
  modified_base 1028: mod_base = OTHER; note = N1-methylpseudouracil
  modified_base 1048: mod_base = OTHER; note = N1-methylpseudouracil
  modified_base 1049: mod_base = OTHER; note = N1-methylpseudouracil
  modified_base 1052: mod_base = OTHER; note = N1-methylpseudouracil
  modified_base 1054: mod_base = OTHER; note = N1-methylpseudouracil
  modified_base 1057: mod_base = OTHER; note = N1-methylpseudouracil
  modified_base 1061: mod_base = OTHER; note = N1-methylpseudouracil
  modified_base 1075: mod_base = OTHER; note = N1-methylpseudouracil
  modified_base 1079: mod_base = OTHER; note = N1-methylpseudouracil
  modified_base 1087: mod_base = OTHER; note = N1-methylpseudouracil
  modified_base 1088: mod_base = OTHER; note = N1-methylpseudouracil
  modified_base 1091: mod_base = OTHER; note = N1-methylpseudouracil
  modified_base 1094: mod_base = OTHER; note = N1-methylpseudouracil
  modified_base 1096: mod_base = OTHER; note = N1-methylpseudouracil
  modified_base 1115: mod_base = OTHER; note = N1-methylpseudouracil
  modified_base 1126: mod_base = OTHER; note = N1-methylpseudouracil
  modified_base 1135: mod_base = OTHER; note = N1-methylpseudouracil
  modified_base 1139: mod_base = OTHER; note = N1-methylpseudouracil
  modified_base 1148: mod_base = OTHER; note = N1-methylpseudouracil
  modified_base 1151: mod_base = OTHER; note = N1-methylpseudouracil
  modified_base 1153: mod_base = OTHER; note = N1-methylpseudouracil
  modified_base 1157: mod_base = OTHER; note = N1-methylpseudouracil
  modified_base 1165: mod_base = OTHER; note = N1-methylpseudouracil
  modified_base 1172: mod_base = OTHER; note = N1-methylpseudouracil
  modified_base 1178: mod_base = OTHER; note = N1-methylpseudouracil
  modified_base 1181: mod_base = OTHER; note = N1-methylpseudouracil
  modified_base 1189: mod_base = OTHER; note = N1-methylpseudouracil
  modified_base 1193: mod_base = OTHER; note = N1-methylpseudouracil
  modified_base 1196: mod_base = OTHER; note = N1-methylpseudouracil
  modified_base 1199: mod_base = OTHER; note = N1-methylpseudouracil
  modified_base 1246: mod_base = OTHER; note = N1-methylpseudouracil
  modified_base 1253: mod_base = OTHER; note = N1-methylpseudouracil
  modified_base 1260: mod_base = OTHER; note = N1-methylpseudouracil
  modified_base 1278: mod_base = OTHER; note = N1-methylpseudouracil
  modified_base 1283: mod_base = OTHER; note = N1-methylpseudouracil
  modified_base 1286: mod_base = OTHER; note = N1-methylpseudouracil
  modified_base 1291: mod_base = OTHER; note = N1-methylpseudouracil
  modified_base 1292: mod_base = OTHER; note = N1-methylpseudouracil
  modified_base 1295: mod_base = OTHER; note = N1-methylpseudouracil
  modified_base 1304: mod_base = OTHER; note = N1-methylpseudouracil
  modified_base 1328: mod_base = OTHER; note = N1-methylpseudouracil
  modified_base 1331: mod_base = OTHER; note = N1-methylpseudouracil
  modified_base 1352: mod_base = OTHER; note = N1-methylpseudouracil
  modified_base 1359: mod_base = OTHER; note = N1-methylpseudouracil
  modified_base 1364: mod_base = OTHER; note = N1-methylpseudouracil
  modified_base 1367: mod_base = OTHER; note = N1-methylpseudouracil
  modified_base 1373: mod_base = OTHER; note = N1-methylpseudouracil
  modified_base 1378: mod_base = OTHER; note = N1-methylpseudouracil
  modified_base 1384: mod_base = OTHER; note = N1-methylpseudouracil
  modified_base 1392: mod_base = OTHER; note = N1-methylpseudouracil
  modified_base 1402: mod_base = OTHER; note = N1-methylpseudouracil
  modified_base 1406: mod_base = OTHER; note = N1-methylpseudouracil
  modified_base 1411: mod_base = OTHER; note = N1-methylpseudouracil
  modified_base 1415: mod_base = OTHER; note = N1-methylpseudouracil
  modified_base 1416: mod_base = OTHER; note = N1-methylpseudouracil
  modified_base 1418: mod_base = OTHER; note = N1-methylpseudouracil
  modified_base 1419: mod_base = OTHER; note = N1-methylpseudouracil
  modified_base 1425: mod_base = OTHER; note = N1-methylpseudouracil
  modified_base 1426: mod_base = OTHER; note = N1-methylpseudouracil
  modified_base 1432: mod_base = OTHER; note = N1-methylpseudouracil
  modified_base 1445: mod_base = OTHER; note = N1-methylpseudouracil
  modified_base 1448: mod_base = OTHER; note = N1-methylpseudouracil
  modified_base 1453: mod_base = OTHER; note = N1-methylpseudouracil
  modified_base 1454: mod_base = OTHER; note = N1-methylpseudouracil
  modified_base 1457: mod_base = OTHER; note = N1-methylpseudouracil
  modified_base 1465: mod_base = OTHER; note = N1-methylpseudouracil
  modified_base 1473: mod_base = OTHER; note = N1-methylpseudouracil
  modified_base 1476: mod_base = OTHER; note = N1-methylpseudouracil
  modified_base 1478: mod_base = OTHER; note = N1-methylpseudouracil
  modified_base 1479: mod_base = OTHER; note = N1-methylpseudouracil
  modified_base 1480: mod_base = OTHER; note = N1-methylpseudouracil
  modified_base 1484: mod_base = OTHER; note = N1-methylpseudouracil
  modified_base 1489: mod_base = OTHER; note = N1-methylpseudouracil
  modified_base 1491: mod_base = OTHER; note = N1-methylpseudouracil
  modified_base 1495: mod_base = OTHER; note = N1-methylpseudouracil

SEQ ID NO: 304 - RNA, 1502 nt, synthetic construct
  source 1..1502: mol_type = other RNA
  modified_base 6: mod_base = OTHER; note = N1-methylpseudouracil
  modified_base 14: mod_base = OTHER; note = N1-methylpseudouracil
  modified_base 15: mod_base = OTHER; note = N1-methylpseudouracil
  modified_base 16: mod_base = OTHER; note = N1-methylpseudouracil
  modified_base 19: mod_base = OTHER; note = N1-methylpseudouracil
  modified_base 21: mod_base = OTHER; note = N1-methylpseudouracil
  modified_base 22: mod_base = OTHER; note = N1-methylpseudouracil
  modified_base 27: mod_base = OTHER; note = N1-methylpseudouracil
  modified_base 28: mod_base = OTHER; note = N1-methylpseudouracil
  modified_base 32: mod_base = OTHER; note = N1-methylpseudouracil
  modified_base 33: mod_base = OTHER; note = N1-methylpseudouracil
  modified_base 34: mod_base = OTHER; note = N1-methylpseudouracil
  modified_base 36: mod_base = OTHER; note = N1-methylpseudouracil
  modified_base 37: mod_base = OTHER; note = N1-methylpseudouracil
  modified_base 38: mod_base = OTHER; note = N1-methylpseudouracil
  modified_base 39: mod_base = OTHER; note = N1-methylpseudouracil
  modified_base 42: mod_base = OTHER; note = N1-methylpseudouracil
  modified_base 43: mod_base = OTHER; note = N1-methylpseudouracil
  modified_base 44: mod_base = OTHER; note = N1-methylpseudouracil
  modified_base 45: mod_base = OTHER; note = N1-methylpseudouracil
  modified_base 47: mod_base = OTHER; note = N1-methylpseudouracil
  modified_base 54: mod_base = OTHER; note = N1-methylpseudouracil
  modified_base 62: mod_base = OTHER; note = N1-methylpseudouracil
  modified_base 63: mod_base = OTHER; note = N1-methylpseudouracil
  modified_base 64: mod_base = OTHER; note = N1-methylpseudouracil
  modified_base 65: mod_base = OTHER; note = N1-methylpseudouracil
  modified_base 66: mod_base = OTHER; note = N1-methylpseudouracil
  modified_base 68: mod_base = OTHER; note = N1-methylpseudouracil
  modified_base 69: mod_base = OTHER; note = N1-methylpseudouracil
  modified_base 71: mod_base = OTHER; note = N1-methylpseudouracil
  modified_base 77: mod_base = OTHER; note = N1-methylpseudouracil
  modified_base 99: mod_base = OTHER; note = N1-methylpseudouracil
  modified_base 108: mod_base = OTHER; note = N1-methylpseudouracil
  modified_base 133: mod_base = OTHER; note = N1-methylpseudouracil
  modified_base 146: mod_base = OTHER; note = N1-methylpseudouracil
  modified_base 157: mod_base = OTHER; note = N1-methylpseudouracil
  modified_base 164: mod_base = OTHER; note = N1-methylpseudouracil
  modified_base 175: mod_base = OTHER; note = N1-methylpseudouracil
  modified_base 182: mod_base = OTHER; note = N1-methylpseudouracil
  modified_base 194: mod_base = OTHER; note = N1-methylpseudouracil
  modified_base 199: mod_base = OTHER; note = N1-methylpseudouracil
  modified_base 200: mod_base = OTHER; note = N1-methylpseudouracil
  modified_base 206: mod_base = OTHER; note = N1-methylpseudouracil
  modified_base 210: mod_base = OTHER; note = N1-methylpseudouracil
  modified_base 216: mod_base = OTHER; note = N1-methylpseudouracil
  modified_base 227: mod_base = OTHER; note = N1-methylpseudouracil
  modified_base 231: mod_base = OTHER; note = N1-methylpseudouracil
  modified_base 235: mod_base = OTHER; note = N1-methylpseudouracil
  modified_base 236: mod_base = OTHER; note = N1-methylpseudouracil
  modified_base 238: mod_base = OTHER; note = N1-methylpseudouracil
  modified_base 247: mod_base = OTHER; note = N1-methylpseudouracil
  modified_base 251: mod_base = OTHER; note = N1-methylpseudouracil
  modified_base 253: mod_base = OTHER; note = N1-methylpseudouracil
  modified_base 254: mod_base = OTHER; note = N1-methylpseudouracil
  modified_base 257: mod_base = OTHER; note = N1-methylpseudouracil
  modified_base 268: mod_base = OTHER; note = N1-methylpseudouracil
  modified_base 269: mod_base = OTHER; note = N1-methylpseudouracil
  modified_base 278: mod_base = OTHER; note = N1-methylpseudouracil
  modified_base 281: mod_base = OTHER; note = N1-methylpseudouracil
  modified_base 296: mod_base = OTHER; note = N1-methylpseudouracil
  modified_base 308: mod_base = OTHER; note = N1-methylpseudouracil
  modified_base 317: mod_base = OTHER; note = N1-methylpseudouracil
  modified_base 323: mod_base = OTHER; note = N1-methylpseudouracil
  modified_base 326: mod_base = OTHER; note = N1-methylpseudouracil
  modified_base 332: mod_base = OTHER; note = N1-methylpseudouracil
  modified_base 341: mod_base = OTHER; note = N1-methylpseudouracil
  modified_base 365: mod_base = OTHER; note = N1-methylpseudouracil
  modified_base 374: mod_base = OTHER; note = N1-methylpseudouracil
  modified_base 377: mod_base = OTHER; note = N1-methylpseudouracil
  modified_base 380: mod_base = OTHER; note = N1-methylpseudouracil
  modified_base 385: mod_base = OTHER; note = N1-methylpseudouracil
  modified_base 389: mod_base = OTHER; note = N1-methylpseudouracil
  modified_base 395: mod_base = OTHER; note = N1-methylpseudouracil
  modified_base 400: mod_base = OTHER; note = N1-methylpseudouracil
  modified_base 404: mod_base = OTHER; note = N1-methylpseudouracil
  modified_base 406: mod_base = OTHER; note = N1-methylpseudouracil
  modified_base 428: mod_base = OTHER; note = N1-methylpseudouracil
  modified_base 437: mod_base = OTHER; note = N1-methylpseudouracil
  modified_base 440: mod_base = OTHER; note = N1-methylpseudouracil
  modified_base 444: mod_base = OTHER; note = N1-methylpseudouracil
  modified_base 452: mod_base = OTHER; note = N1-methylpseudouracil
  modified_base 458: mod_base = OTHER; note = N1-methylpseudouracil
  modified_base 462: mod_base = OTHER; note = N1-methylpseudouracil
  modified_base 463: mod_base = OTHER; note = N1-methylpseudouracil
  modified_base 466: mod_base = OTHER; note = N1-methylpseudouracil
  modified_base 473: mod_base = OTHER; note = N1-methylpseudouracil
  modified_base 485: mod_base = OTHER; note = N1-methylpseudouracil
  modified_base 491: mod_base = OTHER; note = N1-methylpseudouracil
  modified_base 495: mod_base = OTHER; note = N1-methylpseudouracil
  modified_base 498: mod_base = OTHER; note = N1-methylpseudouracil
  modified_base 500: mod_base = OTHER; note = N1-methylpseudouracil
  modified_base 503: mod_base = OTHER; note = N1-methylpseudouracil
  modified_base 506: mod_base = OTHER; note = N1-methylpseudouracil
  modified_base 508: mod_base = OTHER; note = N1-methylpseudouracil
  modified_base 517: mod_base = OTHER; note = N1-methylpseudouracil
  modified_base 521: mod_base = OTHER; note = N1-methylpseudouracil
  modified_base 524: mod_base = OTHER; note = N1-methylpseudouracil
  modified_base 532: mod_base = OTHER; note = N1-methylpseudouracil
  modified_base 549: mod_base = OTHER; note = N1-methylpseudouracil
  modified_base 558: mod_base = OTHER; note = N1-methylpseudouracil
  modified_base 560: mod_base = OTHER; note = N1-methylpseudouracil
  modified_base 565: mod_base = OTHER; note = N1-methylpseudouracil
  modified_base 575: mod_base = OTHER; note = N1-methylpseudouracil
  modified_base 581: mod_base = OTHER; note = N1-methylpseudouracil
  modified_base 584: mod_base = OTHER; note = N1-methylpseudouracil
  modified_base 586: mod_base = OTHER; note = N1-methylpseudouracil
  modified_base 587: mod_base = OTHER; note = N1-methylpseudouracil
  modified_base 592: mod_base = OTHER; note = N1-methylpseudouracil
  modified_base 593: mod_base = OTHER; note = N1-methylpseudouracil
  modified_base 607: mod_base = OTHER; note = N1-methylpseudouracil
  modified_base 619: mod_base = OTHER; note = N1-methylpseudouracil
  modified_base 620: mod_base = OTHER; note = N1-methylpseudouracil
  modified_base 622: mod_base = OTHER; note = N1-methylpseudouracil
  modified_base 623: mod_base = OTHER; note = N1-methylpseudouracil
  modified_base 626: mod_base = OTHER; note = N1-methylpseudouracil
  modified_base 629: mod_base = OTHER; note = N1-methylpseudouracil
  modified_base 635: mod_base = OTHER; note = N1-methylpseudouracil
  modified_base 638: mod_base = OTHER; note = N1-methylpseudouracil
  modified_base 641: mod_base = OTHER; note = N1-methylpseudouracil
  modified_base 647: mod_base = OTHER; note = N1-methylpseudouracil
  modified_base 665: mod_base = OTHER; note = N1-methylpseudouracil
  modified_base 671: mod_base = OTHER; note = N1-methylpseudouracil
  modified_base 674: mod_base = OTHER; note = N1-methylpseudouracil
  modified_base 678: mod_base = OTHER; note = N1-methylpseudouracil
  modified_base 683: mod_base = OTHER; note = N1-methylpseudouracil
  modified_base 685: mod_base = OTHER; note = N1-methylpseudouracil
  modified_base 686: mod_base = OTHER; note = N1-methylpseudouracil
  modified_base 695: mod_base = OTHER; note = N1-methylpseudouracil
  modified_base 701: mod_base = OTHER; note = N1-methylpseudouracil
  modified_base 719: mod_base = OTHER; note = N1-methylpseudouracil
  modified_base 722: mod_base = OTHER; note = N1-methylpseudouracil
  modified_base 731: mod_base = OTHER; note = N1-methylpseudouracil
  modified_base 733: mod_base = OTHER; note = N1-methylpseudouracil
  modified_base 734: mod_base = OTHER; note = N1-methylpseudouracil
  modified_base 740: mod_base = OTHER; note = N1-methylpseudouracil
  modified_base 748: mod_base = OTHER; note = N1-methylpseudouracil
  modified_base 752: mod_base = OTHER; note = N1-methylpseudouracil
  modified_base 764: mod_base = OTHER; note = N1-methylpseudouracil
  modified_base 770: mod_base = OTHER; note = N1-methylpseudouracil
  modified_base 772: mod_base = OTHER; note = N1-methylpseudouracil
  modified_base 773: mod_base = OTHER; note = N1-methylpseudouracil
  modified_base 782: mod_base = OTHER; note = N1-methylpseudouracil
  modified_base 794: mod_base = OTHER; note = N1-methylpseudouracil
  modified_base 801: mod_base = OTHER; note = N1-methylpseudouracil
  modified_base 808: mod_base = OTHER; note = N1-methylpseudouracil
  modified_base 809: mod_base = OTHER; note = N1-methylpseudouracil
  modified_base 811: mod_base = OTHER; note = N1-methylpseudouracil
  modified_base 812: mod_base = OTHER; note = N1-methylpseudouracil
  modified_base 818: mod_base = OTHER; note = N1-methylpseudouracil
  modified_base 821: mod_base = OTHER; note = N1-methylpseudouracil
  modified_base 827: mod_base = OTHER; note = N1-methylpseudouracil
  modified_base 829: mod_base = OTHER; note = N1-methylpseudouracil
  modified_base 833: mod_base = OTHER; note = N1-methylpseudouracil
  modified_base 841: mod_base = OTHER; note = N1-methylpseudouracil
  modified_base 855: mod_base = OTHER; note = N1-methylpseudouracil
  modified_base 860: mod_base = OTHER; note = N1-methylpseudouracil
  modified_base 872: mod_base = OTHER; note = N1-methylpseudouracil
  modified_base 875: mod_base = OTHER; note = N1-methylpseudouracil
  modified_base 877: mod_base = OTHER; note = N1-methylpseudouracil
  modified_base 886: mod_base = OTHER; note = N1-methylpseudouracil
  modified_base 887: mod_base = OTHER; note = N1-methylpseudouracil
  modified_base 889: mod_base = OTHER; note = N1-methylpseudouracil
  modified_base 900: mod_base = OTHER; note = N1-methylpseudouracil
  modified_base 907: mod_base = OTHER; note = N1-methylpseudouracil
  modified_base 908: mod_base = OTHER; note = N1-methylpseudouracil
  modified_base 912: mod_base = OTHER; note = N1-methylpseudouracil
  modified_base 919: mod_base = OTHER; note = N1-methylpseudouracil
  modified_base 921: mod_base = OTHER; note = N1-methylpseudouracil
  modified_base 938: mod_base = OTHER; note = N1-methylpseudouracil
  modified_base 940: mod_base = OTHER; note = N1-methylpseudouracil
  modified_base 941: mod_base = OTHER; note = N1-methylpseudouracil
  modified_base 946: mod_base = OTHER; note = N1-methylpseudouracil
  modified_base 949: mod_base = OTHER; note = N1-methylpseudouracil
  modified_base 950: mod_base = OTHER; note = N1-methylpseudouracil
  modified_base 956: mod_base = OTHER; note = N1-methylpseudouracil
  modified_base 959: mod_base = OTHER; note = N1-methylpseudouracil
  modified_base 962: mod_base = OTHER; note = N1-methylpseudouracil
  modified_base 968: mod_base = OTHER; note = N1-methylpseudouracil
  modified_base 996: mod_base = OTHER; note = N1-methylpseudouracil
  modified_base 1003: mod_base = OTHER; note = N1-methylpseudouracil
  modified_base 1004: mod_base = OTHER; note = N1-methylpseudouracil
  modified_base 1007: mod_base = OTHER; note = N1-methylpseudouracil
  modified_base 1016: mod_base = OTHER; note = N1-methylpseudouracil
  modified_base 1024: mod_base = OTHER; note = N1-methylpseudouracil
  modified_base 1028: mod_base = OTHER; note = N1-methylpseudouracil
  modified_base 1032: mod_base = OTHER; note = N1-methylpseudouracil
  modified_base 1035: mod_base = OTHER; note = N1-methylpseudouracil
  modified_base 1048: mod_base = OTHER; note = N1-methylpseudouracil
  modified_base 1049: mod_base = OTHER; note = N1-methylpseudouracil
  modified_base 1052: mod_base = OTHER; note = N1-methylpseudouracil
  modified_base 1054: mod_base = OTHER; note = N1-methylpseudouracil
  modified_base 1061: mod_base = OTHER; note = N1-methylpseudouracil
  modified_base 1074: mod_base = OTHER; note = N1-methylpseudouracil
  modified_base 1079: mod_base = OTHER; note = N1-methylpseudouracil
  modified_base 1087: mod_base = OTHER; note = N1-methylpseudouracil
  modified_base 1088: mod_base = OTHER; note = N1-methylpseudouracil
  modified_base 1091: mod_base = OTHER; note = N1-methylpseudouracil
  modified_base 1094: mod_base = OTHER; note = N1-methylpseudouracil
  modified_base 1115: mod_base = OTHER; note = N1-methylpseudouracil
  modified_base 1126: mod_base = OTHER; note = N1-methylpseudouracil
  modified_base 1135: mod_base = OTHER; note = N1-methylpseudouracil
  modified_base 1139: mod_base = OTHER; note = N1-methylpseudouracil
  modified_base 1140: mod_base = OTHER; note = N1-methylpseudouracil
  modified_base 1148: mod_base = OTHER; note = N1-methylpseudouracil
  modified_base 1149: mod_base = OTHER; note = N1-methylpseudouracil
  modified_base 1151: mod_base = OTHER; note = N1-methylpseudouracil
  modified_base 1153: mod_base = OTHER; note = N1-methylpseudouracil
  modified_base 1155: mod_base = OTHER; note = N1-methylpseudouracil
  modified_base 1157: mod_base = OTHER; note = N1-methylpseudouracil
  modified_base 1165: mod_base = OTHER; note = N1-methylpseudouracil
  modified_base 1172: mod_base = OTHER; note = N1-methylpseudouracil
  modified_base 1178: mod_base = OTHER; note = N1-methylpseudouracil
  modified_base 1181: mod_base = OTHER; note = N1-methylpseudouracil
  modified_base 1189: mod_base = OTHER; note = N1-methylpseudouracil
  modified_base 1193: mod_base = OTHER; note = N1-methylpseudouracil
  modified_base 1196: mod_base = OTHER; note = N1-methylpseudouracil
  modified_base 1199: mod_base = OTHER; note = N1-methylpseudouracil
  modified_base 1203: mod_base = OTHER; note = N1-methylpseudouracil
  modified_base 1218: mod_base = OTHER; note = N1-methylpseudouracil
  modified_base 1253: mod_base = OTHER; note = N1-methylpseudouracil
  modified_base 1283: mod_base = OTHER; note = N1-methylpseudouracil
  modified_base 1286: mod_base = OTHER; note = N1-methylpseudouracil
  modified_base 1291: mod_base = OTHER; note = N1-methylpseudouracil
  modified_base 1292: mod_base = OTHER; note = N1-methylpseudouracil
  modified_base 1295: mod_base = OTHER; note = N1-methylpseudouracil
  modified_base 1304: mod_base = OTHER; note = N1-methylpseudouracil
  modified_base 1324: mod_base = OTHER; note = N1-methylpseudouracil
  modified_base 1328: mod_base = OTHER; note = N1-methylpseudouracil
  modified_base 1331: mod_base = OTHER; note = N1-methylpseudouracil
  modified_base 1350: mod_base = OTHER; note = N1-methylpseudouracil
  modified_base 1352: mod_base = OTHER; note = N1-methylpseudouracil
  modified_base 1356: mod_base = OTHER; note = N1-methylpseudouracil
  modified_base 1362: mod_base = OTHER; note = N1-methylpseudouracil
  modified_base 1364: mod_base = OTHER; note = N1-methylpseudouracil
  modified_base 1367: mod_base = OTHER; note = N1-methylpseudouracil
  modified_base 1373: mod_base = OTHER; note = N1-methylpseudouracil
  modified_base 1384: mod_base = OTHER; note = N1-methylpseudouracil
  modified_base 1392: mod_base = OTHER; note = N1-methylpseudouracil
  modified_base 1402: mod_base = OTHER; note = N1-methylpseudouracil
  modified_base 1406: mod_base = OTHER; note = N1-methylpseudouracil
  modified_base 1411: mod_base = OTHER; note = N1-methylpseudouracil
  modified_base 1415: mod_base = OTHER; note = N1-methylpseudouracil
  modified_base 1416: mod_base = OTHER; note = N1-methylpseudouracil
  modified_base 1418: mod_base = OTHER; note = N1-methylpseudouracil
  modified_base 1419: mod_base = OTHER; note = N1-methylpseudouracil
  modified_base 1425: mod_base = OTHER; note = N1-methylpseudouracil
  modified_base 1426: mod_base = OTHER; note = N1-methylpseudouracil
  modified_base 1432: mod_base = OTHER; note = N1-methylpseudouracil
  modified_base 1445: mod_base = OTHER; note = N1-methylpseudouracil
  modified_base 1448: mod_base = OTHER; note = N1-methylpseudouracil
  modified_base 1453: mod_base = OTHER; note = N1-methylpseudouracil
  modified_base 1454: mod_base = OTHER; note = N1-methylpseudouracil
  modified_base 1457: mod_base = OTHER; note = N1-methylpseudouracil
  modified_base 1465: mod_base = OTHER; note = N1-methylpseudouracil
  modified_base 1473: mod_base = OTHER; note = N1-methylpseudouracil
  modified_base 1476: mod_base = OTHER; note = N1-methylpseudouracil
  modified_base 1478: mod_base = OTHER; note = N1-methylpseudouracil
  modified_base 1479: mod_base = OTHER; note = N1-methylpseudouracil
  modified_base 1480: mod_base = OTHER; note = N1-methylpseudouracil
  modified_base 1484: mod_base = OTHER; note = N1-methylpseudouracil
  modified_base 1489: mod_base = OTHER; note = N1-methylpseudouracil
  modified_base 1491: mod_base = OTHER; note = N1-methylpseudouracil
  modified_base 1495: mod_base = OTHER; note = N1-methylpseudouracil
ggaaatcgcaaaatttgctcttcgcgttagatttcttttagttttctcgcaactagcaagctttttgttctcgccatgggcagcagcaagagcaagcctaaggaccctagccagagaagaagaggcggaggctccgcccacgccatggagaacagctggaccatcagcaaggagtaccacatcgacgaggaggtgggcttcgccctgcctaaccctcaggagaacctgcctgacttctacaacgactggatgttcatcgccaagcacttgccggacctgatcgagagcggccagctgagagagagagtggagaagctgaacatgctgagcatcgaccacctgaccgaccacaagagccagagactggccagactggtgctgggctgcatcaccatggcctacgtgtggggcaagggccacggcgacgtgagaaaggtgctgcctagaaacatcgccgtgccttactgccagctgagcaagaagctggagctgcctcctatcctggtgtacgccgactgcgtgctggccaactggaagaagaaggaccctaacaagcctctgacctacgagaacatggacgtgctgttcagcttcagagacggcgactgcagcaagggcttcttcctggtgagcctgctggtggagatcgccgccgccagcgccatcaaggtgatccctaccgtgttcaaggccatgcagatgcaggagagagacaccctgctgaaggccctgttggagatagccagctgcctggagaaggcactgcaggtgttccaccagatccacgaccacgtgaaccctaaggccttcttcagcgtgctgagaatctacctgagcggctggaagggcaaccctcagctgagcgacggcctggtctacgagggcttctgggaggaccctaaggagttcgctggcggctctgccggccagagcagcgtgttccagtgcttcgacgtgctgctgggcatccaacaaaccgcaggaggcggccacgctgcacagttcctgcaggacatgagaagatacatgcctcctgcccacagaaacttcctgtgcagcctggagagcaaccctagcgtgagagagttcgtgctgagcaagggcgacgccggcctgagagaggcctacgacgcctgcgttaaggcccttgtgtctctgagaagctaccacctgcagatcgtgaccaagtacatcctgatccctgccagccagcagcctaaggagaacaagaccagcgaggacccaagcaagctggaggccaagggcaccggcggcaccgacctgatgaacttcctgaagaccgtgagaagcaccaccgagaagtccctcctgaaggagggcggcaagcctatccctaaccctctgctgggcctggacagcacctaagcccctccgggggcctcggtggcctagcttcttgccccttgggcctccccccagcccctcctccccttcctgcacccgtacccccgtggtctttgaataaagtctgagtgggcggc

SEQ ID NO: 305 - RNA, 1502 nt, synthetic construct; identical to SEQ ID NO: 304
  source 1..1502: mol_type = other RNA
  modified_base 6: mod_base = OTHER; note = N1-methylpseudouracil
  modified_base 14: mod_base = OTHER; note = N1-methylpseudouracil
  modified_base 15: mod_base = OTHER; note = N1-methylpseudouracil
  modified_base 16: mod_base = OTHER; note = N1-methylpseudouracil
  modified_base 19: mod_base = OTHER; note = N1-methylpseudouracil
  modified_base 21: mod_base = OTHER; note = N1-methylpseudouracil
  modified_base 22: mod_base = OTHER; note = N1-methylpseudouracil
  modified_base 27: mod_base = OTHER; note = N1-methylpseudouracil
  modified_base 28: mod_base = OTHER; note = N1-methylpseudouracil
  modified_base 32: mod_base = OTHER; note = N1-methylpseudouracil
  modified_base 33: mod_base = OTHER; note = N1-methylpseudouracil
  modified_base 34: mod_base = OTHER; note = N1-methylpseudouracil
  modified_base 36: mod_base = OTHER; note = N1-methylpseudouracil
  modified_base 37: mod_base = OTHER; note = N1-methylpseudouracil
  modified_base 38: mod_base = OTHER; note = N1-methylpseudouracil
  modified_base 39: mod_base = OTHER; note = N1-methylpseudouracil
  modified_base 42: mod_base = OTHER; note = N1-methylpseudouracil
  modified_base 43: mod_base = OTHER; note = N1-methylpseudouracil
  modified_base 44: mod_base = OTHER; note = N1-methylpseudouracil
  modified_base 45: mod_base = OTHER; note = N1-methylpseudouracil
  modified_base 47: mod_base = OTHER; note = N1-methylpseudouracil
  modified_base 54: mod_base = OTHER; note = N1-methylpseudouracil
  modified_base 62: mod_base = OTHER; note = N1-methylpseudouracil
  modified_base 63: mod_base = OTHER; note = N1-methylpseudouracil
  modified_base 64: mod_base = OTHER; note = N1-methylpseudouracil
  modified_base 65: mod_base = OTHER; note = N1-methylpseudouracil
  modified_base 66: mod_base = OTHER; note = N1-methylpseudouracil
  modified_base 68: mod_base = OTHER; note = N1-methylpseudouracil
  modified_base 69: mod_base = OTHER; note = N1-methylpseudouracil
  modified_base 71: mod_base = OTHER; note = N1-methylpseudouracil
  modified_base 77: mod_base = OTHER; note = N1-methylpseudouracil
  modified_base 99: mod_base = OTHER; note = N1-methylpseudouracil
  modified_base 108: mod_base = OTHER; note = N1-methylpseudouracil
  modified_base 133: mod_base = OTHER; note = N1-methylpseudouracil
  modified_base 146: mod_base = OTHER; note = N1-methylpseudouracil
  modified_base 157: mod_base = OTHER; note = N1-methylpseudouracil
  modified_base 164: mod_base = OTHER; note = N1-methylpseudouracil
  modified_base 175: mod_base = OTHER; note = N1-methylpseudouracil
  modified_base 182: mod_base = OTHER; note = N1-methylpseudouracil
  modified_base 194: mod_base = OTHER; note = N1-methylpseudouracil
  modified_base 199: mod_base = OTHER; note = N1-methylpseudouracil
  modified_base 200: mod_base = OTHER; note = N1-methylpseudouracil
  modified_base 206: mod_base = OTHER; note = N1-methylpseudouracil
  modified_base 210: mod_base = OTHER; note = N1-methylpseudouracil
  modified_base 216: mod_base = OTHER; note = N1-methylpseudouracil
  modified_base 227: mod_base = OTHER; note = N1-methylpseudouracil
  modified_base 231: mod_base = OTHER; note = N1-methylpseudouracil
  modified_base 235: mod_base = OTHER; note = N1-methylpseudouracil
  modified_base 236: mod_base = OTHER; note = N1-methylpseudouracil
  modified_base 238: mod_base = OTHER; note = N1-methylpseudouracil
  modified_base 247: mod_base = OTHER; note = N1-methylpseudouracil
  modified_base 251: mod_base = OTHER; note = N1-methylpseudouracil
  modified_base 253: mod_base = OTHER; note = N1-methylpseudouracil
  modified_base 254: mod_base = OTHER; note = N1-methylpseudouracil
  modified_base 257: mod_base = OTHER; note = N1-methylpseudouracil
  modified_base 268: mod_base = OTHER; note = N1-methylpseudouracil
  modified_base 269: mod_base = OTHER; note = N1-methylpseudouracil
  modified_base 278: mod_base = OTHER; note = N1-methylpseudouracil
  modified_base 281: mod_base = OTHER; note = N1-methylpseudouracil
  modified_base 296: mod_base = OTHER; note = N1-methylpseudouracil
  modified_base 308: mod_base = OTHER; note = N1-methylpseudouracil
  modified_base 317: mod_base = OTHER; note = N1-methylpseudouracil
  modified_base 323: mod_base = OTHER; note = N1-methylpseudouracil
  modified_base 326: mod_base = OTHER; note = N1-methylpseudouracil
  modified_base 332: mod_base = OTHER; note = N1-methylpseudouracil
  modified_base 341: mod_base = OTHER; note = N1-methylpseudouracil
  modified_base 365: mod_base = OTHER; note = N1-methylpseudouracil
  modified_base 374: mod_base = OTHER; note = N1-methylpseudouracil
  modified_base 377: mod_base = OTHER; note = N1-methylpseudouracil
  modified_base 380: mod_base = OTHER; note = N1-methylpseudouracil
  modified_base 385: mod_base = OTHER; note = N1-methylpseudouracil
  modified_base 389: mod_base = OTHER; note = N1-methylpseudouracil
  modified_base 395: mod_base = OTHER; note = N1-methylpseudouracil
  modified_base 400: mod_base = OTHER; note = N1-methylpseudouracil
  modified_base 404: mod_base = OTHER; note = N1-methylpseudouracil
  modified_base 406: mod_base = OTHER; note = N1-methylpseudouracil
  modified_base 428: mod_base = OTHER; note = N1-methylpseudouracil
  modified_base 437: mod_base = OTHER; note = N1-methylpseudouracil
  modified_base 440: mod_base = OTHER; note = N1-methylpseudouracil
  modified_base 444: mod_base = OTHER; note = N1-methylpseudouracil
  modified_base 452: mod_base = OTHER; note = N1-methylpseudouracil
  modified_base 458: mod_base = OTHER; note = N1-methylpseudouracil
  modified_base 462: mod_base = OTHER; note = N1-methylpseudouracil
  modified_base 463: mod_base = OTHER; note = N1-methylpseudouracil
  modified_base 466: mod_base = OTHER; note = N1-methylpseudouracil
  modified_base 473: mod_base = OTHER; note = N1-methylpseudouracil
  modified_base 485: mod_base = OTHER; note = N1-methylpseudouracil
  modified_base 491: mod_base = OTHER; note = N1-methylpseudouracil
  modified_base 495: mod_base = OTHER; note = N1-methylpseudouracil
  modified_base 498: mod_base = OTHER; note = N1-methylpseudouracil
  modified_base 500: mod_base = OTHER; note = N1-methylpseudouracil
  modified_base 503: mod_base = OTHER; note = N1-methylpseudouracil
  modified_base 506: mod_base = OTHER; note = N1-methylpseudouracil
  modified_base 508: mod_base = OTHER; note = N1-methylpseudouracil
  modified_base 517: mod_base = OTHER; note = N1-methylpseudouracil
  modified_base 521: mod_base = OTHER; note = N1-methylpseudouracil
  modified_base 524: mod_base = OTHER; note = N1-methylpseudouracil
  modified_base 532: mod_base = OTHER; note = N1-methylpseudouracil
  modified_base 549: mod_base = OTHER; note = N1-methylpseudouracil
  modified_base 558: mod_base = OTHER; note = N1-methylpseudouracil
  modified_base 560: mod_base = OTHER; note = N1-methylpseudouracil
  modified_base 565: mod_base = OTHER; note = N1-methylpseudouracil
  modified_base 575: mod_base = OTHER; note = N1-methylpseudouracil
  modified_base 581: mod_base = OTHER; note = N1-methylpseudouracil
  modified_base 584: mod_base = OTHER; note = N1-methylpseudouracil
  modified_base 586: mod_base = OTHER; note = N1-methylpseudouracil
  modified_base 587: mod_base = OTHER; note = N1-methylpseudouracil
  modified_base 592: mod_base = OTHER; note = N1-methylpseudouracil
  modified_base 593: mod_base = OTHER; note = N1-methylpseudouracil
  modified_base 607: mod_base = OTHER; note = N1-methylpseudouracil
  modified_base 619: mod_base = OTHER; note = N1-methylpseudouracil
  modified_base 620: mod_base = OTHER; note = N1-methylpseudouracil
  modified_base 622: mod_base = OTHER; note = N1-methylpseudouracil
  modified_base 623: mod_base = OTHER; note = N1-methylpseudouracil
  modified_base 626: mod_base = OTHER; note = N1-methylpseudouracil
  modified_base 629: mod_base = OTHER; note = N1-methylpseudouracil
  modified_base 635: mod_base = OTHER; note = N1-methylpseudouracil
  modified_base 638: mod_base = OTHER; note = N1-methylpseudouracil
  modified_base 641: mod_base = OTHER; note = N1-methylpseudouracil
  modified_base 647: mod_base = OTHER; note = N1-methylpseudouracil
  modified_base 665: mod_base = OTHER; note = N1-methylpseudouracil
  modified_base 671: mod_base = OTHER; note = N1-methylpseudouracil
  modified_base 674: mod_base = OTHER; note = N1-methylpseudouracil
  modified_base 678: mod_base = OTHER; note = N1-methylpseudouracil
  modified_base 683: mod_base = OTHER; note = N1-methylpseudouracil
  modified_base 685: mod_base = OTHER; note = N1-methylpseudouracil
  modified_base 686: mod_base = OTHER; note = N1-methylpseudouracil
  modified_base 695: mod_base = OTHER; note = N1-methylpseudouracil
  modified_base 701: mod_base = OTHER; note = N1-methylpseudouracil
  modified_base 719: mod_base = OTHER; note = N1-methylpseudouracil
  modified_base 722: mod_base = OTHER; note = N1-methylpseudouracil
  modified_base 731: mod_base = OTHER; note = N1-methylpseudouracil
  modified_base 733: mod_base = OTHER; note = N1-methylpseudouracil
  modified_base 734: mod_base = OTHER; note = N1-methylpseudouracil
  modified_base 740: mod_base = OTHER; note = N1-methylpseudouracil
  modified_base 748: mod_base = OTHER; note = N1-methylpseudouracil
  modified_base 752: mod_base = OTHER; note = N1-methylpseudouracil
  modified_base 764: mod_base = OTHER; note = N1-methylpseudouracil
  modified_base 770: mod_base = OTHER; note = N1-methylpseudouracil
  modified_base 772: mod_base = OTHER; note = N1-methylpseudouracil
  modified_base 773: mod_base = OTHER; note = N1-methylpseudouracil
  modified_base 782: mod_base = OTHER; note = N1-methylpseudouracil
  modified_base 794: mod_base = OTHER; note = N1-methylpseudouracil
  modified_base 801: mod_base = OTHER; note = N1-methylpseudouracil
  modified_base 808: mod_base = OTHER; note = N1-methylpseudouracil
  modified_base 809: mod_base = OTHER; note = N1-methylpseudouracil
  modified_base 811: mod_base = OTHER; note = N1-methylpseudouracil
  modified_base 812: mod_base = OTHER; note = N1-methylpseudouracil
  modified_base 818: mod_base = OTHER; note = N1-methylpseudouracil
  modified_base 821: mod_base = OTHER; note = N1-methylpseudouracil
  modified_base 827: mod_base = OTHER; note = N1-methylpseudouracil
  modified_base 829: mod_base = OTHER; note = N1-methylpseudouracil
  modified_base 833: mod_base = OTHER; note = N1-methylpseudouracil
  modified_base 841: mod_base = OTHER; note = N1-methylpseudouracil
  modified_base 855: mod_base = OTHER; note = N1-methylpseudouracil
  modified_base 860: mod_base = OTHER; note = N1-methylpseudouracil
  modified_base 872: mod_base = OTHER; note = N1-methylpseudouracil
  modified_base 875: mod_base = OTHER; note = N1-methylpseudouracil
  modified_base 877: mod_base = OTHER; note = N1-methylpseudouracil
  modified_base 886: mod_base = OTHER; note = N1-methylpseudouracil
  modified_base 887: mod_base = OTHER; note = N1-methylpseudouracil
  modified_base 889: mod_base = OTHER; note = N1-methylpseudouracil
  modified_base 900: mod_base = OTHER; note = N1-methylpseudouracil
  modified_base 907: mod_base = OTHER; note = N1-methylpseudouracil
  modified_base 908: mod_base = OTHER; note = N1-methylpseudouracil
  modified_base 912: mod_base = OTHER; note = N1-methylpseudouracil
  modified_base 919: mod_base = OTHER; note = N1-methylpseudouracil
  modified_base 921: mod_base = OTHER; note = N1-methylpseudouracil
  modified_base 938: mod_base = OTHER; note = N1-methylpseudouracil
  modified_base 940: mod_base = OTHER; note = N1-methylpseudouracil
  modified_base 941: mod_base = OTHER; note = N1-methylpseudouracil
  modified_base 946: mod_base = OTHER; note = N1-methylpseudouracil
  modified_base 949: mod_base = OTHER; note = N1-methylpseudouracil
  modified_base 950: mod_base = OTHER; note = N1-methylpseudouracil
  modified_base 956: mod_base = OTHER; note = N1-methylpseudouracil
  modified_base 959: mod_base = OTHER; note = N1-methylpseudouracil
  modified_base 962: mod_base = OTHER; note = N1-methylpseudouracil
  modified_base 968: mod_base = OTHER; note = N1-methylpseudouracil
  modified_base 996: mod_base = OTHER; note = N1-methylpseudouracil
  modified_base 1003: mod_base = OTHER; note = N1-methylpseudouracil
  modified_base 1004: mod_base = OTHER; note = N1-methylpseudouracil
  modified_base 1007: mod_base = OTHER; note = N1-methylpseudouracil
  modified_base 1016: mod_base = OTHER; note = N1-methylpseudouracil
  modified_base 1024: mod_base = OTHER; note = N1-methylpseudouracil
  modified_base 1028: mod_base = OTHER; note = N1-methylpseudouracil
  modified_base 1032: mod_base = OTHER; note = N1-methylpseudouracil
  modified_base 1035: mod_base = OTHER; note = N1-methylpseudouracil
  modified_base 1048: mod_base = OTHER; note = N1-methylpseudouracil
  modified_base 1049: mod_base = OTHER; note = N1-methylpseudouracil
  modified_base 1052: mod_base = OTHER; note = N1-methylpseudouracil
  modified_base 1054: mod_base = OTHER; note = N1-methylpseudouracil
  modified_base 1061: mod_base = OTHER; note = N1-methylpseudouracil
  modified_base 1074: mod_base = OTHER; note = N1-methylpseudouracil
  modified_base 1079: mod_base = OTHER; note = N1-methylpseudouracil
  modified_base 1087: mod_base = OTHER; note = N1-methylpseudouracil
  modified_base 1088: mod_base = OTHER; note = N1-methylpseudouracil
  modified_base 1091: mod_base = OTHER; note = N1-methylpseudouracil
  modified_base 1094: mod_base = OTHER; note = N1-methylpseudouracil
  modified_base 1115: mod_base = OTHER; note = N1-methylpseudouracil
  modified_base 1126: mod_base = OTHER; note = N1-methylpseudouracil
  modified_base 1135: mod_base = OTHER; note = N1-methylpseudouracil
  modified_base 1139: mod_base = OTHER; note = N1-methylpseudouracil
  modified_base 1140: mod_base = OTHER; note = N1-methylpseudouracil
  modified_base 1148: mod_base = OTHER; note = N1-methylpseudouracil
  modified_base 1149: mod_base = OTHER; note = N1-methylpseudouracil
  modified_base 1151: mod_base = OTHER; note = N1-methylpseudouracil
  modified_base 1153: mod_base = OTHER; note = N1-methylpseudouracil
  modified_base 1155: mod_base = OTHER; note = N1-methylpseudouracil
  modified_base 1157: mod_base = OTHER; note = N1-methylpseudouracil
  modified_base 1165: mod_base = OTHER; note = N1-methylpseudouracil
  modified_base 1172: mod_base = OTHER; note = N1-methylpseudouracil
  modified_base 1178: mod_base = OTHER; note = N1-methylpseudouracil
  modified_base 1181: mod_base = OTHER; note = N1-methylpseudouracil
  modified_base 1189: mod_base = OTHER; note = N1-methylpseudouracil
  modified_base 1193: mod_base = OTHER; note = N1-methylpseudouracil
  modified_base 1196: mod_base = OTHER; note = N1-methylpseudouracil
  modified_base 1199: mod_base = OTHER; note = N1-methylpseudouracil
  modified_base 1203: mod_base = OTHER; note = N1-methylpseudouracil
  modified_base 1218: mod_base = OTHER; note = N1-methylpseudouracil
  modified_base 1253: mod_base = OTHER; note = N1-methylpseudouracil
  modified_base 1283: mod_base = OTHER; note = N1-methylpseudouracil
  modified_base 1286: mod_base = OTHER; note = N1-methylpseudouracil
  modified_base 1291: mod_base = OTHER; note = N1-methylpseudouracil
  modified_base 1292: mod_base = OTHER; note = N1-methylpseudouracil
  modified_base 1295: mod_base = OTHER; note = N1-methylpseudouracil
  modified_base 1304: mod_base = OTHER; note = N1-methylpseudouracil
  modified_base 1324: mod_base = OTHER; note = N1-methylpseudouracil
  modified_base 1328: mod_base = OTHER; note = N1-methylpseudouracil
  modified_base 1331: mod_base = OTHER; note = N1-methylpseudouracil
  modified_base 1350: mod_base = OTHER; note = N1-methylpseudouracil
  modified_base 1352: mod_base = OTHER; note = N1-methylpseudouracil
  modified_base 1356: mod_base = OTHER; note = N1-methylpseudouracil
  modified_base 1362: mod_base = OTHER; note = N1-methylpseudouracil
  modified_base 1364: mod_base = OTHER; note = N1-methylpseudouracil
  modified_base 1367: mod_base = OTHER; note = N1-methylpseudouracil
  modified_base 1373: mod_base = OTHER; note = N1-methylpseudouracil
  modified_base 1384: mod_base = OTHER; note = N1-methylpseudouracil
  modified_base 1392: mod_base = OTHER; note = N1-methylpseudouracil
  modified_base 1402: mod_base = OTHER; note = N1-methylpseudouracil
  modified_base 1406: mod_base = OTHER; note = N1-methylpseudouracil
  modified_base 1411: mod_base = OTHER; note = N1-methylpseudouracil
  modified_base 1415: mod_base = OTHER; note = N1-methylpseudouracil
  modified_base 1416: mod_base = OTHER; note = N1-methylpseudouracil
  modified_base 1418: mod_base = OTHER; note = N1-methylpseudouracil
  modified_base 1419: mod_base = OTHER; note = N1-methylpseudouracil
  modified_base 1425: mod_base = OTHER; note = N1-methylpseudouracil
  modified_base 1426: mod_base = OTHER; note = N1-methylpseudouracil
  modified_base 1432: mod_base = OTHER; note = N1-methylpseudouracil
  modified_base 1445: mod_base = OTHER; note = N1-methylpseudouracil
  modified_base 1448: mod_base = OTHER; note = N1-methylpseudouracil
  modified_base 1453: mod_base = OTHER; note = N1-methylpseudouracil
  modified_base 1454: mod_base = OTHER; note = N1-methylpseudouracil
  modified_base 1457: mod_base = OTHER; note = N1-methylpseudouracil
  modified_base 1465: mod_base = OTHER; note = N1-methylpseudouracil
  modified_base 1473: mod_base = OTHER; note = N1-methylpseudouracil
  modified_base 1476: mod_base = OTHER; note = N1-methylpseudouracil
  modified_base 1478: mod_base = OTHER; note = N1-methylpseudouracil
  modified_base 1479: mod_base = OTHER; note = N1-methylpseudouracil
  modified_base 1480: mod_base = OTHER; note = N1-methylpseudouracil
  modified_base 1484: mod_base = OTHER; note = N1-methylpseudouracil
  modified_base 1489: mod_base = OTHER; note = N1-methylpseudouracil
  modified_base 1491: mod_base = OTHER; note = N1-methylpseudouracil
  modified_base 1495: mod_base = OTHER; note = N1-methylpseudouracil

SEQ ID NO: 306 - RNA, 1502 nt, synthetic construct
  source 1..1502: mol_type = other RNA
  modified_base 6: mod_base = OTHER; note = N1-methylpseudouracil
  modified_base 14: mod_base = OTHER; note = N1-methylpseudouracil
  modified_base 15: mod_base = OTHER; note = N1-methylpseudouracil
  modified_base 16: mod_base = OTHER; note = N1-methylpseudouracil
  modified_base 19: mod_base = OTHER; note = N1-methylpseudouracil
  modified_base 21: mod_base = OTHER; note = N1-methylpseudouracil
  modified_base 22: mod_base = OTHER; note = N1-methylpseudouracil
  modified_base 27: mod_base = OTHER; note = N1-methylpseudouracil
  modified_base 28: mod_base = OTHER; note = N1-methylpseudouracil
  modified_base 32: mod_base = OTHER; note = N1-methylpseudouracil
  modified_base 33: mod_base = OTHER; note = N1-methylpseudouracil
  modified_base 34: mod_base = OTHER; note = N1-methylpseudouracil
  modified_base 36: mod_base = OTHER; note = N1-methylpseudouracil
  modified_base 37: mod_base = OTHER; note = N1-methylpseudouracil
  modified_base 38: mod_base = OTHER; note = N1-methylpseudouracil
  modified_base 39: mod_base = OTHER; note = N1-methylpseudouracil
  modified_base 42: mod_base = OTHER; note = N1-methylpseudouracil
  modified_base 43: mod_base = OTHER; note = N1-methylpseudouracil
  modified_base 44: mod_base = OTHER; note = N1-methylpseudouracil
  modified_base 45: mod_base = OTHER; note = N1-methylpseudouracil
  modified_base 47: mod_base = OTHER; note = N1-methylpseudouracil
  modified_base 54: mod_base = OTHER; note = N1-methylpseudouracil
  modified_base 62: mod_base = OTHER; note = N1-methylpseudouracil
  modified_base 63: mod_base = OTHER; note = N1-methylpseudouracil
  modified_base 64: mod_base = OTHER; note = N1-methylpseudouracil
  modified_base 65: mod_base = OTHER; note = N1-methylpseudouracil
  modified_base 66: mod_base = OTHER; note = N1-methylpseudouracil
  modified_base 68: mod_base = OTHER; note = N1-methylpseudouracil
  modified_base 69: mod_base = OTHER; note = N1-methylpseudouracil
  modified_base 71: mod_base = OTHER; note = N1-methylpseudouracil
  modified_base 77: mod_base = OTHER; note = N1-methylpseudouracil
  modified_base 99: mod_base = OTHER; note = N1-methylpseudouracil
  modified_base 108: mod_base = OTHER; note = N1-methylpseudouracil
  modified_base 133: mod_base = OTHER; note = N1-methylpseudouracil
  modified_base 146: mod_base = OTHER; note = N1-methylpseudouracil
  modified_base 157: mod_base = OTHER; note = N1-methylpseudouracil
  modified_base 164: mod_base = OTHER; note = N1-methylpseudouracil
  modified_base 175: mod_base = OTHER; note = N1-methylpseudouracil
  modified_base 182: mod_base = OTHER; note = N1-methylpseudouracil
  modified_base 194: mod_base = OTHER; note = N1-methylpseudouracil
  modified_base 199: mod_base = OTHER; note = N1-methylpseudouracil
  modified_base 200: mod_base = OTHER; note = N1-methylpseudouracil
  modified_base 206: mod_base = OTHER; note = N1-methylpseudouracil
  modified_base 210: mod_base = OTHER; note = N1-methylpseudouracil
  modified_base 216: mod_base = OTHER; note = N1-methylpseudouracil
  modified_base 227: mod_base = OTHER; note = N1-methylpseudouracil
  modified_base 231: mod_base = OTHER; note = N1-methylpseudouracil
  modified_base 235: mod_base = OTHER; note = N1-methylpseudouracil
  modified_base 236: mod_base = OTHER; note = N1-methylpseudouracil
  modified_base 238: mod_base = OTHER; note = N1-methylpseudouracil
  modified_base 247: mod_base = OTHER; note = N1-methylpseudouracil
  modified_base 251: mod_base = OTHER; note = N1-methylpseudouracil
  modified_base 253: mod_base = OTHER; note = N1-methylpseudouracil
  modified_base 254: mod_base = OTHER; note = N1-methylpseudouracil
  modified_base 257: mod_base = OTHER; note = N1-methylpseudouracil
  modified_base 268: mod_base = OTHER; note = N1-methylpseudouracil
  modified_base 269: mod_base = OTHER; note = N1-methylpseudouracil
  modified_base 278: mod_base = OTHER; note = N1-methylpseudouracil
  modified_base 281: mod_base = OTHER; note = N1-methylpseudouracil
  modified_base 296: mod_base = OTHER; note = N1-methylpseudouracil
  modified_base 308: mod_base = OTHER; note = N1-methylpseudouracil
  modified_base 317: mod_base = OTHER; note = N1-methylpseudouracil
  modified_base 323: mod_base = OTHER; note = N1-methylpseudouracil
  modified_base 326: mod_base = OTHER; note = N1-methylpseudouracil
  modified_base 332: mod_base = OTHER; note = N1-methylpseudouracil
  modified_base 341: mod_base = OTHER; note = N1-methylpseudouracil
  modified_base 365: mod_base = OTHER; note = N1-methylpseudouracil
  modified_base 374: mod_base = OTHER; note = N1-methylpseudouracil
  modified_base 377: mod_base = OTHER; note = N1-methylpseudouracil
  modified_base 380: mod_base = OTHER; note = N1-methylpseudouracil
  modified_base 385: mod_base = OTHER; note = N1-methylpseudouracil
  modified_base 389: mod_base = OTHER; note = N1-methylpseudouracil
  modified_base 395: mod_base = OTHER; note = N1-methylpseudouracil
  modified_base 400: mod_base = OTHER; note = N1-methylpseudouracil
  modified_base 404: mod_base = OTHER; note = N1-methylpseudouracil
  modified_base 406: mod_base = OTHER; note = N1-methylpseudouracil
  modified_base 428: mod_base = OTHER; note = N1-methylpseudouracil
  modified_base 437: mod_base = OTHER; note = N1-methylpseudouracil
  modified_base 440: mod_base = OTHER; note = N1-methylpseudouracil
  modified_base 444: mod_base = OTHER; note = N1-methylpseudouracil
  modified_base 452: mod_base = OTHER; note = N1-methylpseudouracil
  modified_base 458: mod_base = OTHER; note = N1-methylpseudouracil
  modified_base 462: mod_base = OTHER; note = N1-methylpseudouracil
  modified_base 463: mod_base = OTHER; note = N1-methylpseudouracil
  modified_base 466: mod_base = OTHER; note = N1-methylpseudouracil
  modified_base 473: mod_base = OTHER; note = N1-methylpseudouracil
  modified_base 485: mod_base = OTHER; note = N1-methylpseudouracil
  modified_base 491: mod_base = OTHER; note = N1-methylpseudouracil
  modified_base 495: mod_base = OTHER; note = N1-methylpseudouracil
  modified_base 498: mod_base = OTHER; note = N1-methylpseudouracil
  modified_base 500: mod_base = OTHER; note = N1-methylpseudouracil
  modified_base 503: mod_base = OTHER; note = N1-methylpseudouracil
  modified_base 506: mod_base = OTHER; note = N1-methylpseudouracil
  modified_base 508: mod_base = OTHER; note = N1-methylpseudouracil
  modified_base 517: mod_base = OTHER; note = N1-methylpseudouracil
  modified_base 521: mod_base = OTHER; note = N1-methylpseudouracil
  modified_base 524: mod_base = OTHER; note = N1-methylpseudouracil
  modified_base 532: mod_base = OTHER; note = N1-methylpseudouracil
  modified_base 549: mod_base = OTHER; note = N1-methylpseudouracil
  modified_base 558: mod_base = OTHER; note = N1-methylpseudouracil
  modified_base 560: mod_base = OTHER; note = N1-methylpseudouracil
  modified_base 565: mod_base = OTHER; note = N1-methylpseudouracil
  modified_base 575: mod_base = OTHER; note = N1-methylpseudouracil
  modified_base 581: mod_base = OTHER; note = N1-methylpseudouracil
  modified_base 584: mod_base = OTHER; note = N1-methylpseudouracil
  modified_base 586: mod_base = OTHER; note = N1-methylpseudouracil
  modified_base 587: mod_base = OTHER; note = N1-methylpseudouracil
  modified_base 592: mod_base = OTHER; note = N1-methylpseudouracil
  modified_base 593: mod_base = OTHER; note = N1-methylpseudouracil
  modified_base 607: mod_base = OTHER; note = N1-methylpseudouracil
  modified_base 619: mod_base = OTHER; note = N1-methylpseudouracil
  modified_base 620: mod_base = OTHER; note = N1-methylpseudouracil
  modified_base 622: mod_base = OTHER; note = N1-methylpseudouracil
  modified_base 623: mod_base = OTHER; note = N1-methylpseudouracil
  modified_base 626: mod_base = OTHER; note = N1-methylpseudouracil
  modified_base 629: mod_base = OTHER; note = N1-methylpseudouracil
  modified_base 635: mod_base = OTHER; note = N1-methylpseudouracil
  modified_base 638: mod_base = OTHER; note = N1-methylpseudouracil
  modified_base 641: mod_base = OTHER; note = N1-methylpseudouracil
  modified_base 647: mod_base = OTHER; note = N1-methylpseudouracil
  modified_base 665: mod_base = OTHER; note = N1-methylpseudouracil
  modified_base 671: mod_base = OTHER; note = N1-methylpseudouracil
  modified_base 674: mod_base = OTHER; note = N1-methylpseudouracil
  modified_base 678: mod_base = OTHER; note = N1-methylpseudouracil
  modified_base 683: mod_base = OTHER; note = N1-methylpseudouracil
  modified_base 685: mod_base = OTHER; note = N1-methylpseudouracil
  modified_base 686: mod_base = OTHER; note = N1-methylpseudouracil
  modified_base 695: mod_base = OTHER; note = N1-methylpseudouracil
  modified_base 701: mod_base = OTHER; note = N1-methylpseudouracil
  modified_base 719: mod_base = OTHER; note = N1-methylpseudouracil
  modified_base 722: mod_base = OTHER; note = N1-methylpseudouracil
  modified_base 731: mod_base = OTHER; note = N1-methylpseudouracil
  modified_base 733: mod_base = OTHER; note = N1-methylpseudouracil
  modified_base 734: mod_base = OTHER; note = N1-methylpseudouracil
  modified_base 740: mod_base = OTHER; note = N1-methylpseudouracil
  modified_base 748: mod_base = OTHER; note = N1-methylpseudouracil
  modified_base 752: mod_base = OTHER; note = N1-methylpseudouracil
  modified_base 764: mod_base = OTHER; note = N1-methylpseudouracil
  modified_base 770: mod_base = OTHER; note = N1-methylpseudouracil
  modified_base 772: mod_base = OTHER; note = N1-methylpseudouracil
  modified_base 773: mod_base = OTHER; note = N1-methylpseudouracil
  modified_base 782: mod_base = OTHER; note = N1-methylpseudouracil
  modified_base 794: mod_base = OTHER; note = N1-methylpseudouracil
  modified_base 801: mod_base = OTHER; note = N1-methylpseudouracil
  modified_base 808: mod_base = OTHER; note = N1-methylpseudouracil
  modified_base 809: mod_base = OTHER; note = N1-methylpseudouracil
  modified_base 811: mod_base = OTHER; note = N1-methylpseudouracil
  modified_base 812: mod_base = OTHER; note = N1-methylpseudouracil
  modified_base 818: mod_base = OTHER; note = N1-methylpseudouracil
  modified_base 821: mod_base = OTHER; note = N1-methylpseudouracil
  modified_base 827: mod_base = OTHER; note = N1-methylpseudouracil
  modified_base 829: mod_base = OTHER; note = N1-methylpseudouracil
  modified_base 833: mod_base = OTHER; note = N1-methylpseudouracil
  modified_base 841: mod_base = OTHER; note = N1-methylpseudouracil
  modified_base 855: mod_base = OTHER; note = N1-methylpseudouracil
  modified_base 860: mod_base = OTHER; note = N1-methylpseudouracil
  modified_base 872: mod_base = OTHER; note = N1-methylpseudouracil
  modified_base 875: mod_base = OTHER; note = N1-methylpseudouracil
  modified_base 877: mod_base = OTHER; note = N1-methylpseudouracil
  modified_base 886: mod_base = OTHER; note = N1-methylpseudouracil
  modified_base 887: mod_base = OTHER; note = N1-methylpseudouracil
  modified_base 889: mod_base = OTHER; note = N1-methylpseudouracil
  modified_base 900: mod_base = OTHER; note = N1-methylpseudouracil
  modified_base 907: mod_base = OTHER; note = N1-methylpseudouracil
  modified_base 908: mod_base = OTHER; note = N1-methylpseudouracil
  modified_base 912: mod_base = OTHER; note = N1-methylpseudouracil
  modified_base 919: mod_base = OTHER; note = N1-methylpseudouracil
  modified_base 921: mod_base = OTHER; note = N1-methylpseudouracil
  modified_base 938: mod_base = OTHER; note = N1-methylpseudouracil
  modified_base 940: mod_base = OTHER; note = N1-methylpseudouracil
  modified_base 941: mod_base = OTHER; note = N1-methylpseudouracil
  modified_base 946: mod_base = OTHER; note = N1-methylpseudouracil
  modified_base 949: mod_base = OTHER; note = N1-methylpseudouracil
  modified_base 950: mod_base = OTHER; note = N1-methylpseudouracil
  modified_base 956: mod_base = OTHER; note = N1-methylpseudouracil
  modified_base 959: mod_base = OTHER; note = N1-methylpseudouracil
  modified_base 962: mod_base = OTHER; note = N1-methylpseudouracil
  modified_base 968: mod_base = OTHER; note = N1-methylpseudouracil
  modified_base 996: mod_base = OTHER; note = N1-methylpseudouracil
  modified_base 1003: mod_base = OTHER; note = N1-methylpseudouracil
  modified_base 1004: mod_base = OTHER; note = N1-methylpseudouracil
  modified_base 1007: mod_base = OTHER; note = N1-methylpseudouracil
  modified_base 1016: mod_base = OTHER; note = N1-methylpseudouracil
  modified_base 1024: mod_base = OTHER; note = N1-methylpseudouracil
  modified_base 1028: mod_base = OTHER; note = N1-methylpseudouracil
  modified_base 1032: mod_base = OTHER; note = N1-methylpseudouracil
  modified_base 1035: mod_base = OTHER; note = N1-methylpseudouracil
  modified_base 1048: mod_base = OTHER; note = N1-methylpseudouracil
  modified_base 1049: mod_base = OTHER; note = N1-methylpseudouracil
  modified_base 1052: mod_base = OTHER; note = N1-methylpseudouracil
  modified_base 1054: mod_base = OTHER; note = N1-methylpseudouracil
  modified_base 1061: mod_base = OTHER; note = N1-methylpseudouracil
  modified_base 1074: mod_base = OTHER; note = N1-methylpseudouracil
  modified_base 1079: mod_base = OTHER; note = N1-methylpseudouracil
  modified_base 1087: mod_base = OTHER; note = N1-methylpseudouracil
  modified_base 1088: mod_base = OTHER; note = N1-methylpseudouracil
  modified_base 1091: mod_base = OTHER; note = N1-methylpseudouracil
  modified_base 1094: mod_base = OTHER; note = N1-methylpseudouracil
  modified_base 1115: mod_base = OTHER; note = N1-methylpseudouracil
  modified_base 1126: mod_base = OTHER; note = N1-methylpseudouracil
  modified_base 1135: mod_base = OTHER; note = N1-methylpseudouracil
  modified_base 1139: mod_base = OTHER; note = N1-methylpseudouracil
  modified_base 1140: mod_base = OTHER; note = N1-methylpseudouracil
  modified_base 1148: mod_base = OTHER; note = N1-methylpseudouracil
  modified_base 1149: mod_base = OTHER; note = N1-methylpseudouracil
  modified_base 1151: mod_base = OTHER; note = N1-methylpseudouracil
  modified_base 1153: mod_base = OTHER; note = N1-methylpseudouracil
  modified_base 1155: mod_base = OTHER; note = N1-methylpseudouracil
  modified_base 1157: mod_base = OTHER; note = N1-methylpseudouracil
  modified_base 1165: mod_base = OTHER; note = N1-methylpseudouracil
  modified_base 1172: mod_base = OTHER; note = N1-methylpseudouracil
  modified_base 1178: mod_base = OTHER; note = N1-methylpseudouracil
  modified_base 1181: mod_base = OTHER; note = N1-methylpseudouracil
  modified_base 1189: mod_base = OTHER; note = N1-methylpseudouracil
  modified_base 1193: mod_base = OTHER; note = N1-methylpseudouracil
  modified_base 1196: mod_base = OTHER; note = N1-methylpseudouracil
  modified_base 1199: mod_base = OTHER; note = N1-methylpseudouracil
  modified_base 1203: mod_base = OTHER; note = N1-methylpseudouracil
  modified_base 1218: mod_base = OTHER; note = N1-methylpseudouracil
  modified_base 1253: mod_base = OTHER; note = N1-methylpseudouracil
  modified_base 1283: mod_base = OTHER; note = N1-methylpseudouracil
  modified_base 1286: mod_base = OTHER; note = N1-methylpseudouracil
  modified_base 1291: mod_base = OTHER; note = N1-methylpseudouracil
  modified_base 1292: mod_base = OTHER; note = N1-methylpseudouracil
  modified_base 1295: mod_base = OTHER; note = N1-methylpseudouracil
  modified_base 1304: mod_base = OTHER; note = N1-methylpseudouracil
  modified_base 1324: mod_base = OTHER; note = N1-methylpseudouracil
  modified_base 1328: mod_base = OTHER; note = N1-methylpseudouracil
  modified_base 1331: mod_base = OTHER; note = N1-methylpseudouracil
  modified_base 1350: mod_base = OTHER; note = N1-methylpseudouracil
  modified_base 1352: mod_base = OTHER; note = N1-methylpseudouracil
  modified_base 1356: mod_base = OTHER; note = N1-methylpseudouracil
  modified_base 1362: mod_base = OTHER; note = N1-methylpseudouracil
  modified_base 1364: mod_base = OTHER; note = N1-methylpseudouracil
  modified_base 1367: mod_base = OTHER; note = N1-methylpseudouracil
  modified_base 1373: mod_base = OTHER; note = N1-methylpseudouracil
  modified_base 1384: mod_base = OTHER; note = N1-methylpseudouracil
  modified_base 1387: mod_base = OTHER; note = N1-methylpseudouracil
  modified_base 1390: mod_base = OTHER; note = N1-methylpseudouracil
  modified_base 1395: mod_base = OTHER; note = N1-methylpseudouracil
  modified_base 1402: mod_base = OTHER; note = N1-methylpseudouracil
  modified_base 1406: mod_base = OTHER; note = N1-methylpseudouracil
  modified_base 1411: mod_base = OTHER; note = N1-methylpseudouracil
  modified_base 1415: mod_base = OTHER; note = N1-methylpseudouracil
  modified_base 1416: mod_base = OTHER; note = N1-methylpseudouracil
  modified_base 1418: mod_base = OTHER; note = N1-methylpseudouracil
  modified_base 1419: mod_base = OTHER; note = N1-methylpseudouracil
  modified_base 1425: mod_base = OTHER; note = N1-methylpseudouracil
  modified_base 1426: mod_base = OTHER; note = N1-methylpseudouracil
  modified_base 1432: mod_base = OTHER; note = N1-methylpseudouracil
  modified_base 1445: mod_base = OTHER; note = N1-methylpseudouracil
  modified_base 1448: mod_base = OTHER; note = N1-methylpseudouracil
  modified_base 1453: mod_base = OTHER; note = N1-methylpseudouracil
  modified_base 1454: mod_base = OTHER; note = N1-methylpseudouracil
  modified_base 1457: mod_base = OTHER; note = N1-methylpseudouracil
  modified_base 1465: mod_base = OTHER; note = N1-methylpseudouracil
  modified_base 1473: mod_base = OTHER; note = N1-methylpseudouracil
  modified_base 1476: mod_base = OTHER; note = N1-methylpseudouracil
  modified_base 1478: mod_base = OTHER; note = N1-methylpseudouracil
  modified_base 1479: mod_base = OTHER; note = N1-methylpseudouracil
  modified_base 1480: mod_base = OTHER; note = N1-methylpseudouracil
  modified_base 1484: mod_base = OTHER; note = N1-methylpseudouracil
  modified_base 1489: mod_base = OTHER; note = N1-methylpseudouracil
  modified_base 1491: mod_base = OTHER; note = N1-methylpseudouracil
  modified_base 1495: mod_base = OTHER; note = N1-methylpseudouracil
ggaaatcgcaaaatttgctcttcgcgttagatttcttttagttttctcgcaactagcaagctttttgttctcgccatgggcagcagcaagagcaagcctaaggaccctagccagagaagaagaggcggaggctccgcccacgccatggagaacagctggaccatcagcaaggagtaccacatcgacgaggaggtgggcttcgccctgcctaaccctcaggagaacctgcctgacttctacaacgactggatgttcatcgccaagcacttgccggacctgatcgagagcggccagctgagagagagagtggagaagctgaacatgctgagcatcgaccacctgaccgaccacaagagccagagactggccagactggtgctgggctgcatcaccatggcctacgtgtggggcaagggccacggcgacgtgagaaaggtgctgcctagaaacatcgccgtgccttactgccagctgagcaagaagctggagctgcctcctatcctggtgtacgccgactgcgtgctggccaactggaagaagaaggaccctaacaagcctctgacctacgagaacatggacgtgctgttcagcttcagagacggcgactgcagcaagggcttcttcctggtgagcctgctggtggagatcgccgccgccagcgccatcaaggtgatccctaccgtgttcaaggccatgcagatgcaggagagagacaccctgctgaaggccctgttggagatagccagctgcctggagaaggcactgcaggtgttccaccagatccacgaccacgtgaaccctaaggccttcttcagcgtgctgagaatctacctgagcggctggaagggcaaccctcagctgagcgacggcctggtctacgagggcttctgggaggaccctaaggagttcgctggcggctctgccggccagagcagcgtgttccagtgcttcgacgtgctgctgggcatccaacaaaccgcaggaggcggccacgctgcacagttcctgcaggacatgagaagatacatgcctcctgcccacagaaacttcctgtgcagcctggagagcaaccctagcgtgagagagttcgtgctgagcaagggcgacgccggcctgagagaggcctacgacgcctgcgttaaggcccttgtgtctctgagaagctaccacctgcagatcgtgaccaagtacatcctgatccctgccagccagcagcctaaggagaacaagaccagcgaggacccaagcaagctggaggccaagggcaccggcggcaccgacctgatgaacttcctgaagaccgtgagaagcaccaccgagaagtccctcctgaaggagggcggcaagcctatccctaaccctctgctgggcctggacagcacctgataataggctggagcctcggtggcctagcttcttgccccttgggcctccccccagcccctcctccccttcctgcacccgtacccccgtggtctttgaataaagtctgagtgggcggc

SEQ ID NO: 307 - RNA, 1502 nt, synthetic construct
  source 1..1502: mol_type = other RNA
  modified_base 6: mod_base = OTHER; note = N1-methylpseudouracil
  modified_base 14: mod_base = OTHER; note = N1-methylpseudouracil
  modified_base 15: mod_base = OTHER; note = N1-methylpseudouracil
  modified_base 16: mod_base = OTHER; note = N1-methylpseudouracil
  modified_base 19: mod_base = OTHER; note = N1-methylpseudouracil
  modified_base 21: mod_base = OTHER; note = N1-methylpseudouracil
  modified_base 22: mod_base = OTHER; note = N1-methylpseudouracil
  modified_base 27: mod_base = OTHER; note = N1-methylpseudouracil
  modified_base 28: mod_base = OTHER; note = N1-methylpseudouracil
  modified_base 32: mod_base = OTHER; note = N1-methylpseudouracil
  modified_base 33: mod_base = OTHER; note = N1-methylpseudouracil
  modified_base 34: mod_base = OTHER; note = N1-methylpseudouracil
  modified_base 36: mod_base = OTHER; note = N1-methylpseudouracil
  modified_base 37: mod_base = OTHER; note = N1-methylpseudouracil
  modified_base 38: mod_base = OTHER; note = N1-methylpseudouracil
  modified_base 39: mod_base = OTHER; note = N1-methylpseudouracil
  modified_base 42: mod_base = OTHER; note = N1-methylpseudouracil
  modified_base 43: mod_base = OTHER; note = N1-methylpseudouracil
  modified_base 44: mod_base = OTHER; note = N1-methylpseudouracil
  modified_base 45: mod_base = OTHER; note = N1-methylpseudouracil
  modified_base 47: mod_base = OTHER; note = N1-methylpseudouracil
  modified_base 54: mod_base = OTHER; note = N1-methylpseudouracil
  modified_base 62: mod_base = OTHER; note = N1-methylpseudouracil
  modified_base 63: mod_base = OTHER; note = N1-methylpseudouracil
  modified_base 64: mod_base = OTHER; note = N1-methylpseudouracil
  modified_base 65: mod_base = OTHER; note = N1-methylpseudouracil
  modified_base 66: mod_base = OTHER; note = N1-methylpseudouracil
  modified_base 68: mod_base = OTHER; note = N1-methylpseudouracil
  modified_base 69: mod_base = OTHER; note = N1-methylpseudouracil
  modified_base 71: mod_base = OTHER; note = N1-methylpseudouracil
  modified_base 77: mod_base = OTHER; note = N1-methylpseudouracil
  modified_base 99: mod_base = OTHER; note = N1-methylpseudouracil
  modified_base 108: mod_base = OTHER; note = N1-methylpseudouracil
  modified_base 133: mod_base = OTHER; note = N1-methylpseudouracil
  modified_base 146: mod_base = OTHER; note = N1-methylpseudouracil
  modified_base 157: mod_base = OTHER; note = N1-methylpseudouracil
  modified_base 164: mod_base = OTHER; note = N1-methylpseudouracil
  modified_base 175: mod_base = OTHER; note = N1-methylpseudouracil
  modified_base 182: mod_base = OTHER; note = N1-methylpseudouracil
  modified_base 194: mod_base = OTHER; note = N1-methylpseudouracil
  modified_base 199: mod_base = OTHER; note = N1-methylpseudouracil
  modified_base 200: mod_base = OTHER; note = N1-methylpseudouracil
  modified_base 206: mod_base = OTHER; note = N1-methylpseudouracil
  modified_base 210: mod_base = OTHER; note = N1-methylpseudouracil
  modified_base 216: mod_base = OTHER; note = N1-methylpseudouracil
  modified_base 227: mod_base = OTHER; note = N1-methylpseudouracil
  modified_base 231: mod_base = OTHER; note = N1-methylpseudouracil
  modified_base 235: mod_base = OTHER; note = N1-methylpseudouracil
  modified_base 236: mod_base = OTHER; note = N1-methylpseudouracil
  modified_base 238: mod_base = OTHER; note = N1-methylpseudouracil
  modified_base 247: mod_base = OTHER; note = N1-methylpseudouracil
  modified_base 251: mod_base = OTHER; note = N1-methylpseudouracil
  modified_base 253: mod_base = OTHER; note = N1-methylpseudouracil
  modified_base 254: mod_base = OTHER; note = N1-methylpseudouracil
  modified_base 257: mod_base = OTHER; note = N1-methylpseudouracil
  modified_base 268: mod_base = OTHER; note = N1-methylpseudouracil
  modified_base 269: mod_base = OTHER; note = N1-methylpseudouracil
  modified_base 278: mod_base = OTHER; note = N1-methylpseudouracil
  modified_base 281: mod_base = OTHER; note = N1-methylpseudouracil
  modified_base 296: mod_base = OTHER; note = N1-methylpseudouracil
  modified_base 308: mod_base = OTHER; note = N1-methylpseudouracil
  modified_base 317: mod_base = OTHER; note = N1-methylpseudouracil
  modified_base 323: mod_base = OTHER; note = N1-methylpseudouracil
  modified_base 326: mod_base = OTHER; note = N1-methylpseudouracil
  modified_base 332: mod_base = OTHER; note = N1-methylpseudouracil
  modified_base 341: mod_base = OTHER; note = N1-methylpseudouracil
  modified_base 365: mod_base = OTHER; note = N1-methylpseudouracil
  modified_base 374: mod_base = OTHER; note = N1-methylpseudouracil
  modified_base 377: mod_base = OTHER; note = N1-methylpseudouracil
  modified_base 380: mod_base = OTHER; note = N1-methylpseudouracil
  modified_base 385: mod_base = OTHER; note = N1-methylpseudouracil
  modified_base 389: mod_base = OTHER; note = N1-methylpseudouracil
  modified_base 395: mod_base = OTHER; note = N1-methylpseudouracil
  modified_base 400: mod_base = OTHER; note = N1-methylpseudouracil
  modified_base 404: mod_base = OTHER; note = N1-methylpseudouracil
  modified_base 406: mod_base = OTHER; note = N1-methylpseudouracil
  modified_base 428: mod_base = OTHER; note = N1-methylpseudouracil
  modified_base 437: mod_base = OTHER; note = N1-methylpseudouracil
  modified_base 440: mod_base = OTHER; note = N1-methylpseudouracil
  modified_base 444: mod_base = OTHER; note = N1-methylpseudouracil
  modified_base 452: mod_base = OTHER; note = N1-methylpseudouracil
  modified_base 458: mod_base = OTHER; note = N1-methylpseudouracil
  modified_base 462: mod_base = OTHER; note = N1-methylpseudouracil
  modified_base 463: mod_base = OTHER; note = N1-methylpseudouracil
  modified_base 466: mod_base = OTHER; note = N1-methylpseudouracil
  modified_base 473: mod_base = OTHER; note = N1-methylpseudouracil
  modified_base 485: mod_base = OTHER; note = N1-methylpseudouracil
  modified_base 491: mod_base = OTHER; note = N1-methylpseudouracil
  modified_base 495: mod_base = OTHER; note = N1-methylpseudouracil
  modified_base 498: mod_base = OTHER; note = N1-methylpseudouracil
  modified_base 500: mod_base = OTHER; note = N1-methylpseudouracil
  modified_base 503: mod_base = OTHER; note = N1-methylpseudouracil
  modified_base 506: mod_base = OTHER; note = N1-methylpseudouracil
  modified_base 508: mod_base = OTHER; note = N1-methylpseudouracil
  modified_base 517: mod_base = OTHER; note = N1-methylpseudouracil
  modified_base 521: mod_base = OTHER; note = N1-methylpseudouracil
  modified_base 524: mod_base = OTHER; note = N1-methylpseudouracil
  modified_base 532: mod_base = OTHER; note = N1-methylpseudouracil
  modified_base 549: mod_base = OTHER; note = N1-methylpseudouracil
  modified_base 558: mod_base = OTHER; note = N1-methylpseudouracil
  modified_base 560: mod_base = OTHER; note = N1-methylpseudouracil
  modified_base 565: mod_base = OTHER; note = N1-methylpseudouracil
  modified_base 575: mod_base = OTHER; note = N1-methylpseudouracil
  modified_base 581: mod_base = OTHER; note = N1-methylpseudouracil
  modified_base 584: mod_base = OTHER; note = N1-methylpseudouracil
  modified_base 586: mod_base = OTHER; note = N1-methylpseudouracil
  modified_base 587: mod_base = OTHER; note = N1-methylpseudouracil
  modified_base 592: mod_base = OTHER; note = N1-methylpseudouracil
  modified_base 593: mod_base = OTHER; note = N1-methylpseudouracil
  modified_base 607: mod_base = OTHER; note = N1-methylpseudouracil
  modified_base 619: mod_base = OTHER; note = N1-methylpseudouracil
  modified_base 620: mod_base = OTHER; note = N1-methylpseudouracil
  modified_base 622: mod_base = OTHER; note = N1-methylpseudouracil
  modified_base 623: mod_base = OTHER; note = N1-methylpseudouracil
  modified_base 626: mod_base = OTHER; note = N1-methylpseudouracil
  modified_base 629: mod_base = OTHER; note = N1-methylpseudouracil
  modified_base 635: mod_base = OTHER; note = N1-methylpseudouracil
  modified_base 638: mod_base = OTHER; note = N1-methylpseudouracil
  modified_base 641: mod_base = OTHER; note = N1-methylpseudouracil
  modified_base 647: mod_base = OTHER; note = N1-methylpseudouracil
  modified_base 665: mod_base = OTHER; note = N1-methylpseudouracil
  modified_base 671: mod_base = OTHER; note = N1-methylpseudouracil
  modified_base 674: mod_base = OTHER; note = N1-methylpseudouracil
  modified_base 678: mod_base = OTHER; note = N1-methylpseudouracil
  modified_base 683: mod_base = OTHER; note = N1-methylpseudouracil
  modified_base 685: mod_base = OTHER; note = N1-methylpseudouracil
  modified_base 686: mod_base = OTHER; note = N1-methylpseudouracil
  modified_base 695: mod_base = OTHER; note = N1-methylpseudouracil
  modified_base 701: mod_base = OTHER; note = N1-methylpseudouracil
  modified_base 719: mod_base = OTHER; note = N1-methylpseudouracil
  modified_base 722: mod_base = OTHER; note = N1-methylpseudouracil
  modified_base 731: mod_base = OTHER; note = N1-methylpseudouracil
  modified_base 733: mod_base = OTHER; note = N1-methylpseudouracil
  modified_base 734: mod_base = OTHER; note = N1-methylpseudouracil
  modified_base 740: mod_base = OTHER; note = N1-methylpseudouracil
  modified_base 748: mod_base = OTHER; note = N1-methylpseudouracil
  modified_base 752: mod_base = OTHER; note = N1-methylpseudouracil
  modified_base 764: mod_base = OTHER; note = N1-methylpseudouracil
  modified_base 770: mod_base = OTHER; note = N1-methylpseudouracil
  modified_base 772: mod_base = OTHER; note = N1-methylpseudouracil
  modified_base 773: mod_base = OTHER; note = N1-methylpseudouracil
  modified_base 782: mod_base = OTHER; note = N1-methylpseudouracil
  modified_base 794: mod_base = OTHER; note = N1-methylpseudouracil
  modified_base 801: mod_base = OTHER; note = N1-methylpseudouracil
  modified_base 808: mod_base = OTHER; note = N1-methylpseudouracil
  modified_base 809: mod_base = OTHER; note = N1-methylpseudouracil
  modified_base 811: mod_base = OTHER; note = N1-methylpseudouracil
  modified_base 812: mod_base = OTHER; note = N1-methylpseudouracil
  modified_base 818: mod_base = OTHER; note = N1-methylpseudouracil
  modified_base 821: mod_base = OTHER; note = N1-methylpseudouracil
  modified_base 827: mod_base = OTHER; note = N1-methylpseudouracil
  modified_base 829: mod_base = OTHER; note = N1-methylpseudouracil
  modified_base 833: mod_base = OTHER; note = N1-methylpseudouracil
  modified_base 841: mod_base = OTHER; note = N1-methylpseudouracil
  modified_base 855: mod_base = OTHER; note = N1-methylpseudouracil
  modified_base 860: mod_base = OTHER; note = N1-methylpseudouracil
  modified_base 872: mod_base = OTHER; note = N1-methylpseudouracil
  modified_base 875: mod_base = OTHER; note = N1-methylpseudouracil
  modified_base 877: mod_base = OTHER; note = N1-methylpseudouracil
  modified_base 886: mod_base = OTHER; note = N1-methylpseudouracil
  modified_base 887: mod_base = OTHER; note = N1-methylpseudouracil
  modified_base 889: mod_base = OTHER; note = N1-methylpseudouracil
  modified_base 900: mod_base = OTHER; note = N1-methylpseudouracil
  modified_base 907: mod_base = OTHER; note = N1-methylpseudouracil
  modified_base 908: mod_base = OTHER; note = N1-methylpseudouracil
  modified_base 912: mod_base = OTHER; note = N1-methylpseudouracil
  modified_base 919: mod_base = OTHER; note = N1-methylpseudouracil
  modified_base 921: mod_base = OTHER; note = N1-methylpseudouracil
  modified_base 938: mod_base = OTHER; note = N1-methylpseudouracil
  modified_base 940: mod_base = OTHER; note = N1-methylpseudouracil
  modified_base 941: mod_base = OTHER; note = N1-methylpseudouracil
  modified_base 946: mod_base = OTHER; note = N1-methylpseudouracil
  modified_base 949: mod_base = OTHER; note = N1-methylpseudouracil
  modified_base 950: mod_base = OTHER; note = N1-methylpseudouracil
  modified_base 956: mod_base = OTHER; note = N1-methylpseudouracil
  modified_base 959: mod_base = OTHER; note = N1-methylpseudouracil
  modified_base 962: mod_base = OTHER; note = N1-methylpseudouracil
  modified_base 968: mod_base = OTHER; note = N1-methylpseudouracil
  modified_base 996: mod_base = OTHER; note = N1-methylpseudouracil
  modified_base 1003: mod_base = OTHER; note = N1-methylpseudouracil
  modified_base 1004: mod_base = OTHER; note = N1-methylpseudouracil
  modified_base 1007: mod_base = OTHER; note = N1-methylpseudouracil
  modified_base 1016: mod_base = OTHER; note = N1-methylpseudouracil
  modified_base 1024: mod_base = OTHER; note = N1-methylpseudouracil
  modified_base 1028: mod_base = OTHER; note = N1-methylpseudouracil
  modified_base 1032: mod_base = OTHER; note = N1-methylpseudouracil
  modified_base 1035: mod_base = OTHER; note = N1-methylpseudouracil
  modified_base 1048: mod_base = OTHER; note = N1-methylpseudouracil
  modified_base 1049: mod_base = OTHER; note = N1-methylpseudouracil
  modified_base 1052: mod_base = OTHER; note = N1-methylpseudouracil
  modified_base 1054: mod_base = OTHER; note = N1-methylpseudouracil
  modified_base 1061: mod_base = OTHER; note = N1-methylpseudouracil
  modified_base 1074: mod_base = OTHER; note = N1-methylpseudouracil
  modified_base 1079: mod_base = OTHER; note = N1-methylpseudouracil
  modified_base 1087: mod_base = OTHER; note = N1-methylpseudouracil
  modified_base 1088: mod_base = OTHER; note = N1-methylpseudouracil
  modified_base 1091: mod_base = OTHER; note = N1-methylpseudouracil
  modified_base 1094: mod_base = OTHER; note = N1-methylpseudouracil
  modified_base 1115: mod_base = OTHER; note = N1-methylpseudouracil
  modified_base 1126: mod_base = OTHER; note = N1-methylpseudouracil
  modified_base 1135: mod_base = OTHER; note = N1-methylpseudouracil
  modified_base 1139: mod_base = OTHER; note = N1-methylpseudouracil
  modified_base 1140: mod_base = OTHER; note = N1-methylpseudouracil
  modified_base 1148: mod_base = OTHER; note = N1-methylpseudouracil
  modified_base 1149: mod_base = OTHER; note = N1-methylpseudouracil
  modified_base 1151: mod_base = OTHER; note = N1-methylpseudouracil
  modified_base 1153: mod_base = OTHER; note = N1-methylpseudouracil
  modified_base 1155: mod_base = OTHER; note = N1-methylpseudouracil
  modified_base 1157: mod_base = OTHER; note = N1-methylpseudouracil
  modified_base 1165: mod_base = OTHER; note = N1-methylpseudouracil
  modified_base 1172: mod_base = OTHER; note = N1-methylpseudouracil
  modified_base 1178: mod_base = OTHER; note = N1-methylpseudouracil
  modified_base 1181: mod_base = OTHER; note = N1-methylpseudouracil
  modified_base 1189: mod_base = OTHER; note = N1-methylpseudouracil
  modified_base 1193: mod_base = OTHER; note = N1-methylpseudouracil
  modified_base 1196: mod_base = OTHER; note = N1-methylpseudouracil
  modified_base 1199: mod_base = OTHER; note = N1-methylpseudouracil
  modified_base 1203: mod_base = OTHER; note = N1-methylpseudouracil
  modified_base 1218: mod_base = OTHER; note = N1-methylpseudouracil
  modified_base 1253: mod_base = OTHER; note = N1-methylpseudouracil
  modified_base 1283: mod_base = OTHER; note = N1-methylpseudouracil
  modified_base 1286: mod_base = OTHER; note = N1-methylpseudouracil
  modified_base 1291: mod_base = OTHER; note = N1-methylpseudouracil
  modified_base 1292: mod_base = OTHER; note = N1-methylpseudouracil
  modified_base 1295: mod_base = OTHER; note = N1-methylpseudouracil
  modified_base 1304: mod_base = OTHER; note = N1-methylpseudouracil
  modified_base 1324: mod_base = OTHER; note = N1-methylpseudouracil
  modified_base 1328: mod_base = OTHER; note = N1-methylpseudouracil
  modified_base 1331: mod_base = OTHER; note = N1-methylpseudouracil
  modified_base 1350: mod_base = OTHER; note = N1-methylpseudouracil
  modified_base 1352: mod_base = OTHER; note = N1-methylpseudouracil
  modified_base 1356: mod_base = OTHER; note = N1-methylpseudouracil
  modified_base 1362: mod_base = OTHER; note = N1-methylpseudouracil
  modified_base 1364: mod_base = OTHER; note = N1-methylpseudouracil
  modified_base 1367: mod_base = OTHER; note = N1-methylpseudouracil
  modified_base 1373: mod_base = OTHER; note = N1-methylpseudouracil
  modified_base 1384: mod_base = OTHER; note = N1-methylpseudouracil
  modified_base 1388: mod_base = OTHER; note = N1-methylpseudouracil
  modified_base 1390: mod_base = OTHER; note = N1-methylpseudouracil
  modified_base 1395: mod_base = OTHER; note = N1-methylpseudouracil
  modified_base 1402: mod_base = OTHER; note = N1-methylpseudouracil
  modified_base 1406: mod_base = OTHER; note = N1-methylpseudouracil
  modified_base 1411: mod_base = OTHER; note = N1-methylpseudouracil
  modified_base 1415: mod_base = OTHER; note = N1-methylpseudouracil
  modified_base 1416: mod_base = OTHER; note = N1-methylpseudouracil
  modified_base 1418: mod_base = OTHER; note = N1-methylpseudouracil
  modified_base 1419: mod_base = OTHER; note = N1-methylpseudouracil
  modified_base 1425: mod_base = OTHER; note = N1-methylpseudouracil
  modified_base 1426: mod_base = OTHER; note = N1-methylpseudouracil
  modified_base 1432: mod_base = OTHER; note = N1-methylpseudouracil
  modified_base 1445: mod_base = OTHER; note = N1-methylpseudouracil
  modified_base 1448: mod_base = OTHER; note = N1-methylpseudouracil
  modified_base 1453: mod_base = OTHER; note = N1-methylpseudouracil
  modified_base 1454: mod_base = OTHER; note = N1-methylpseudouracil
  modified_base 1457: mod_base = OTHER; note = N1-methylpseudouracil
  modified_base 1465: mod_base = OTHER; note = N1-methylpseudouracil
  modified_base 1473: mod_base = OTHER; note = N1-methylpseudouracil
  modified_base 1476: mod_base = OTHER; note = N1-methylpseudouracil
  modified_base 1478: mod_base = OTHER; note = N1-methylpseudouracil
  modified_base 1479: mod_base = OTHER; note = N1-methylpseudouracil
  modified_base 1480: mod_base = OTHER; note = N1-methylpseudouracil
  modified_base 1484: mod_base = OTHER; note = N1-methylpseudouracil
  modified_base 1489: mod_base = OTHER; note = N1-methylpseudouracil
  modified_base 1491: mod_base = OTHER; note = N1-methylpseudouracil
  modified_base 1495: mod_base = OTHER; note = N1-methylpseudouracil
ggaaatcgcaaaatttgctcttcgcgttagatttcttttagttttctcgcaactagcaagctttttgttctcgccatgggcagcagcaagagcaagcctaaggaccctagccagagaagaagaggcggaggctccgcccacgccatggagaacagctggaccatcagcaaggagtaccacatcgacgaggaggtgggcttcgccctgcctaaccctcaggagaacctgcctgacttctacaacgactggatgttcatcgccaagcacttgccggacctgatcgagagcggccagctgagagagagagtggagaagctgaacatgctgagcatcgaccacctgaccgaccacaagagccagagactggccagactggtgctgggctgcatcaccatggcctacgtgtggggcaagggccacggcgacgtgagaaaggtgctgcctagaaacatcgccgtgccttactgccagctgagcaagaagctggagctgcctcctatcctggtgtacgccgactgcgtgctggccaactggaagaagaaggaccctaacaagcctctgacctacgagaacatggacgtgctgttcagcttcagagacggcgactgcagcaagggcttcttcctggtgagcctgctggtggagatcgccgccgccagcgccatcaaggtgatccctaccgtgttcaaggccatgcagatgcaggagagagacaccctgctgaaggccctgttggagatagccagctgcctggagaaggcactgcaggtgttccaccagatccacgaccacgtgaaccctaaggccttcttcagcgtgctgagaatctacctgagcggctggaagggcaaccctcagctgagcgacggcctggtctacgagggcttctgggaggaccctaaggagttcgctggcggctctgccggccagagcagcgtgttccagtgcttcgacgtgctgctgggcatccaacaaaccgcaggaggcggccacgctgcacagttcctgcaggacatgagaagatacatgcctcctgcccacagaaacttcctgtgcagcctggagagcaaccctagcgtgagagagttcgtgctgagcaagggcgacgccggcctgagagaggcctacgacgcctgcgttaaggcccttgtgtctctgagaagctaccacctgcagatcgtgaccaagtacatcctgatccctgccagccagcagcctaaggagaacaagaccagcgaggacccaagcaagctggaggccaagggcaccggcggcaccgacctgatgaacttcctgaagaccgtgagaagcaccaccgagaagtccctcctgaaggagggcggcaagcctatccctaaccctctgctgggcctggacagcacctaagtctccgctggagcctcggtggcctagcttcttgccccttgggcctccccccagcccctcctccccttcctgcacccgtacccccgtggtctttgaataaagtctgagtgggcggc

SEQ ID NO: 308 - RNA, 1502 nt, synthetic construct
  source 1..1502: mol_type = other RNA
  modified_base 6: mod_base = OTHER; note = N1-methylpseudouracil
  modified_base 14: mod_base = OTHER; note = N1-methylpseudouracil
  modified_base 15: mod_base = OTHER; note = N1-methylpseudouracil
  modified_base 16: mod_base = OTHER; note = N1-methylpseudouracil
  modified_base 19: mod_base = OTHER; note = N1-methylpseudouracil
  modified_base 21: mod_base = OTHER; note = N1-methylpseudouracil
  modified_base 22: mod_base = OTHER; note = N1-methylpseudouracil
  modified_base 27: mod_base = OTHER; note = N1-methylpseudouracil
  modified_base 28: mod_base = OTHER; note = N1-methylpseudouracil
  modified_base 32: mod_base = OTHER; note = N1-methylpseudouracil
  modified_base 33: mod_base = OTHER; note = N1-methylpseudouracil
  modified_base 34: mod_base = OTHER; note = N1-methylpseudouracil
  modified_base 36: mod_base = OTHER; note = N1-methylpseudouracil
  modified_base 37: mod_base = OTHER; note = N1-methylpseudouracil
  modified_base 38: mod_base = OTHER; note = N1-methylpseudouracil
  modified_base 39: mod_base = OTHER; note = N1-methylpseudouracil
  modified_base 42: mod_base = OTHER; note = N1-methylpseudouracil
  modified_base 43: mod_base = OTHER; note = N1-methylpseudouracil
  modified_base 44: mod_base = OTHER; note = N1-methylpseudouracil
  modified_base 45: mod_base = OTHER; note = N1-methylpseudouracil
  modified_base 47: mod_base = OTHER; note = N1-methylpseudouracil
  modified_base 54: mod_base = OTHER; note = N1-methylpseudouracil
  modified_base 62: mod_base = OTHER; note = N1-methylpseudouracil
  modified_base 63: mod_base = OTHER; note = N1-methylpseudouracil
  modified_base 64: mod_base = OTHER; note = N1-methylpseudouracil
  modified_base 65: mod_base = OTHER; note = N1-methylpseudouracil
  modified_base 66: mod_base = OTHER; note = N1-methylpseudouracil
  modified_base 68: mod_base = OTHER; note = N1-methylpseudouracil
  modified_base 69: mod_base = OTHER; note = N1-methylpseudouracil
  modified_base 71: mod_base = OTHER; note = N1-methylpseudouracil
  modified_base 77: mod_base = OTHER; note = N1-methylpseudouracil
  modified_base 82: mod_base = OTHER; note = N1-methylpseudouracil
  modified_base 85: mod_base = OTHER; note = N1-methylpseudouracil
  modified_base 91: mod_base = OTHER; note = N1-methylpseudouracil
  modified_base 105: mod_base = OTHER; note = N1-methylpseudouracil
  modified_base 108: mod_base = OTHER; note = N1-methylpseudouracil
  modified_base 111: mod_base = OTHER; note = N1-methylpseudouracil
  modified_base 133: mod_base = OTHER; note = N1-methylpseudouracil
  modified_base 146: mod_base = OTHER; note = N1-methylpseudouracil
  modified_base 157: mod_base = OTHER; note = N1-methylpseudouracil
  modified_base 164: mod_base = OTHER; note = N1-methylpseudouracil
  modified_base 175: mod_base = OTHER; note = N1-methylpseudouracil
  modified_base 182: mod_base = OTHER; note = N1-methylpseudouracil
  modified_base 194: mod_base = OTHER; note = N1-methylpseudouracil
  modified_base 199: mod_base = OTHER; note = N1-methylpseudouracil
  modified_base 200: mod_base = OTHER; note = N1-methylpseudouracil
  modified_base 206: mod_base = OTHER; note = N1-methylpseudouracil
  modified_base 227: mod_base = OTHER; note = N1-methylpseudouracil
  modified_base 235: mod_base = OTHER; note = N1-methylpseudouracil
  modified_base 236: mod_base = OTHER; note = N1-methylpseudouracil
  modified_base 238: mod_base = OTHER; note = N1-methylpseudouracil
  modified_base 247: mod_base = OTHER; note = N1-methylpseudouracil
  modified_base 251: mod_base = OTHER; note = N1-methylpseudouracil
  modified_base 253: mod_base = OTHER; note = N1-methylpseudouracil
  modified_base 254: mod_base = OTHER; note = N1-methylpseudouracil
  modified_base 257: mod_base = OTHER; note = N1-methylpseudouracil
  modified_base 269: mod_base = OTHER; note = N1-methylpseudouracil
  modified_base 278: mod_base = OTHER; note = N1-methylpseudouracil
  modified_base 281: mod_base = OTHER; note = N1-methylpseudouracil
  modified_base 296: mod_base = OTHER; note = N1-methylpseudouracil
  modified_base 308: mod_base = OTHER; note = N1-methylpseudouracil
  modified_base 317: mod_base = OTHER; note = N1-methylpseudouracil
  modified_base 323: mod_base = OTHER; note = N1-methylpseudouracil
  modified_base 326: mod_base = OTHER; note = N1-methylpseudouracil
  modified_base 332: mod_base = OTHER; note = N1-methylpseudouracil
  modified_base 341: mod_base = OTHER; note = N1-methylpseudouracil
  modified_base 355: mod_base = OTHER; note = N1-methylpseudouracil
  modified_base 364: mod_base = OTHER; note = N1-methylpseudouracil
  modified_base 365: mod_base = OTHER; note = N1-methylpseudouracil
  modified_base 369: mod_base = OTHER; note = N1-methylpseudouracil
  modified_base 374: mod_base = OTHER; note = N1-methylpseudouracil
  modified_base 377: mod_base = OTHER; note = N1-methylpseudouracil
  modified_base 380: mod_base = OTHER; note = N1-methylpseudouracil
  modified_base 385: mod_base = OTHER; note = N1-methylpseudouracil
  modified_base 389: mod_base = OTHER; note = N1-methylpseudouracil
  modified_base 395: mod_base = OTHER; note = N1-methylpseudouracil
  modified_base 400: mod_base = OTHER; note = N1-methylpseudouracil
  modified_base 404: mod_base = OTHER; note = N1-methylpseudouracil
  modified_base 406: mod_base = OTHER; note = N1-methylpseudouracil
  modified_base 423: mod_base = OTHER; note = N1-methylpseudouracil
  modified_base 428: mod_base = OTHER; note = N1-methylpseudouracil
  modified_base 437: mod_base = OTHER; note = N1-methylpseudouracil
  modified_base 440: mod_base = OTHER; note = N1-methylpseudouracil
  modified_base 452: mod_base = OTHER; note = N1-methylpseudouracil
  modified_base 458: mod_base = OTHER; note = N1-methylpseudouracil
  modified_base 463: mod_base = OTHER; note = N1-methylpseudouracil
  modified_base 466: mod_base = OTHER; note = N1-methylpseudouracil
  modified_base 473: mod_base = OTHER; note = N1-methylpseudouracil
  modified_base 485: mod_base = OTHER; note = N1-methylpseudouracil
  modified_base 491: mod_base = OTHER; note = N1-methylpseudouracil
  modified_base 495: mod_base = OTHER; note = N1-methylpseudouracil
  modified_base 500: mod_base = OTHER; note = N1-methylpseudouracil
  modified_base 503: mod_base = OTHER; note = N1-methylpseudouracil
  modified_base 506: mod_base = OTHER; note = N1-methylpseudouracil
  modified_base 508: mod_base = OTHER; note = N1-methylpseudouracil
  modified_base 517: mod_base = OTHER; note = N1-methylpseudouracil
  modified_base 521: mod_base = OTHER; note = N1-methylpseudouracil
  modified_base 524: mod_base = OTHER; note = N1-methylpseudouracil
  modified_base 532: mod_base = OTHER; note = N1-methylpseudouracil
  modified_base 560: mod_base = OTHER; note = N1-methylpseudouracil
  modified_base 565: mod_base = OTHER; note = N1-methylpseudouracil
  modified_base 575: mod_base = OTHER; note = N1-methylpseudouracil
  modified_base 581: mod_base = OTHER; note = N1-methylpseudouracil
  modified_base 584: mod_base = OTHER; note = N1-methylpseudouracil
  modified_base 586: mod_base = OTHER; note = N1-methylpseudouracil
  modified_base 587: mod_base = OTHER; note = N1-methylpseudouracil
  modified_base 589: mod_base = OTHER; note = N1-methylpseudouracil
  modified_base 592: mod_base = OTHER; note = N1-methylpseudouracil
  modified_base 593: mod_base = OTHER; note = N1-methylpseudouracil
  modified_base 607: mod_base = OTHER; note = N1-methylpseudouracil
  modified_base 619: mod_base = OTHER; note = N1-methylpseudouracil
  modified_base 620: mod_base = OTHER; note = N1-methylpseudouracil
  modified_base 622: mod_base = OTHER; note = N1-methylpseudouracil
  modified_base 623: mod_base = OTHER; note = N1-methylpseudouracil
  modified_base 626: mod_base = OTHER; note = N1-methylpseudouracil
  modified_base 629: mod_base = OTHER; note = N1-methylpseudouracil
  modified_base 635: mod_base = OTHER; note = N1-methylpseudouracil
  modified_base 638: mod_base = OTHER; note = N1-methylpseudouracil
  modified_base 641: mod_base = OTHER; note = N1-methylpseudouracil
  modified_base 647: mod_base = OTHER; note = N1-methylpseudouracil
  modified_base 658: mod_base = OTHER; note = N1-methylpseudouracil
  modified_base 660: mod_base = OTHER; note = N1-methylpseudouracil
  modified_base 665: mod_base = OTHER; note = N1-methylpseudouracil
  modified_base 671: mod_base = OTHER; note = N1-methylpseudouracil
  modified_base 674: mod_base = OTHER; note = N1-methylpseudouracil
  modified_base 683: mod_base = OTHER; note = N1-methylpseudouracil
  modified_base 685: mod_base = OTHER; note = N1-methylpseudouracil
  modified_base 686: mod_base = OTHER; note = N1-methylpseudouracil
  modified_base 695: mod_base = OTHER; note = N1-methylpseudouracil
  modified_base 701: mod_base = OTHER; note = N1-methylpseudouracil
  modified_base 719: mod_base = OTHER; note = N1-methylpseudouracil
  modified_base 722: mod_base = OTHER; note = N1-methylpseudouracil
  modified_base 731: mod_base = OTHER; note = N1-methylpseudouracil
  modified_base 734: mod_base = OTHER; note = N1-methylpseudouracil
  modified_base 740: mod_base = OTHER; note = N1-methylpseudouracil
  modified_base 748: mod_base = OTHER; note = N1-methylpseudouracil
  modified_base 752: mod_base = OTHER; note = N1-methylpseudouracil
  modified_base 764: mod_base = OTHER; note = N1-methylpseudouracil
  modified_base 770: mod_base = OTHER; note = N1-methylpseudouracil
  modified_base 772: mod_base = OTHER; note = N1-methylpseudouracil
  modified_base 773: mod_base = OTHER; note = N1-methylpseudouracil
  modified_base 782: mod_base = OTHER; note = N1-methylpseudouracil
  modified_base 794: mod_base = OTHER; note = N1-methylpseudouracil
  modified_base 808: mod_base = OTHER; note = N1-methylpseudouracil
  modified_base 809: mod_base = OTHER; note = N1-methylpseudouracil
  modified_base 811: mod_base = OTHER; note = N1-methylpseudouracil
  modified_base 812: mod_base = OTHER; note = N1-methylpseudouracil
  modified_base 818: mod_base = OTHER; note = N1-methylpseudouracil
  modified_base 821: mod_base = OTHER; note = N1-methylpseudouracil
  modified_base 827: mod_base = OTHER; note = N1-methylpseudouracil
  modified_base 829: mod_base = OTHER; note = N1-methylpseudouracil
  modified_base 833: mod_base = OTHER; note = N1-methylpseudouracil
  modified_base 835: mod_base = OTHER; note = N1-methylpseudouracil
  modified_base 841: mod_base = OTHER; note = N1-methylpseudouracil
  modified_base 852: mod_base = OTHER; note = N1-methylpseudouracil
  modified_base 860: mod_base = OTHER; note = N1-methylpseudouracil
  modified_base 872: mod_base = OTHER; note = N1-methylpseudouracil
  modified_base 875: mod_base = OTHER; note = N1-methylpseudouracil
  modified_base 877: mod_base = OTHER; note = N1-methylpseudouracil
  modified_base 886: mod_base = OTHER; note = N1-methylpseudouracil
  modified_base 887: mod_base = OTHER; note = N1-methylpseudouracil
  modified_base 889: mod_base = OTHER; note = N1-methylpseudouracil
  modified_base 907: mod_base = OTHER; note = N1-methylpseudouracil
  modified_base 908: mod_base = OTHER; note = N1-methylpseudouracil
  modified_base 909: mod_base = OTHER; note = N1-methylpseudouracil
  modified_base 912: mod_base = OTHER; note = N1-methylpseudouracil
  modified_base 918: mod_base = OTHER; note = N1-methylpseudouracil
  modified_base 924: mod_base = OTHER; note = N1-methylpseudouracil
  modified_base 931: mod_base = OTHER; note = N1-methylpseudouracil
  modified_base 938: mod_base = OTHER; note = N1-methylpseudouracil
  modified_base 940: mod_base = OTHER; note = N1-methylpseudouracil
  modified_base 941: mod_base = OTHER; note = N1-methylpseudouracil
  modified_base 946: mod_base = OTHER; note = N1-methylpseudouracil
  modified_base 949: mod_base = OTHER; note = N1-methylpseudouracil
  modified_base 950: mod_base = OTHER; note = N1-methylpseudouracil
  modified_base 956: mod_base = OTHER; note = N1-methylpseudouracil
  modified_base 959: mod_base = OTHER; note = N1-methylpseudouracil
  modified_base 962: mod_base = OTHER; note = N1-methylpseudouracil
  modified_base 968: mod_base = OTHER; note = N1-methylpseudouracil
  modified_base 969: mod_base = OTHER; note = N1-methylpseudouracil
  modified_base 981: mod_base = OTHER; note = N1-methylpseudouracil
  modified_base 996: mod_base = OTHER; note = N1-methylpseudouracil
  modified_base 1003: mod_base = OTHER; note = N1-methylpseudouracil
  modified_base 1004: mod_base = OTHER; note = N1-methylpseudouracil
  modified_base 1007: mod_base = OTHER; note = N1-methylpseudouracil
  modified_base 1016: mod_base = OTHER; note = N1-methylpseudouracil
  modified_base 1024: mod_base = OTHER; note = N1-methylpseudouracil
  modified_base 1028: mod_base = OTHER; note = N1-methylpseudouracil
  modified_base 1048: mod_base = OTHER; note = N1-methylpseudouracil
  modified_base 1049: mod_base = OTHER; note = N1-methylpseudouracil
  modified_base 1052: mod_base = OTHER; note = N1-methylpseudouracil
  modified_base 1054: mod_base = OTHER; note = N1-methylpseudouracil
  modified_base 1057: mod_base = OTHER; note = N1-methylpseudouracil
  modified_base 1061: mod_base = OTHER; note = N1-methylpseudouracil
  modified_base 1075: mod_base = OTHER; note = N1-methylpseudouracil
  modified_base 1079: mod_base = OTHER; note = N1-methylpseudouracil
  modified_base 1087: mod_base = OTHER; note = N1-methylpseudouracil
  modified_base 1088: mod_base = OTHER; note = N1-methylpseudouracil
  modified_base 1091: mod_base = OTHER; note = N1-methylpseudouracil
  modified_base 1094: mod_base = OTHER; note = N1-methylpseudouracil
  modified_base 1096: mod_base = OTHER; note = N1-methylpseudouracil
  modified_base 1115: mod_base = OTHER; note = N1-methylpseudouracil
  modified_base 1126: mod_base = OTHER; note = N1-methylpseudouracil
  modified_base 1135: mod_base = OTHER; note = N1-methylpseudouracil
  modified_base 1139: mod_base = OTHER; note = N1-methylpseudouracil
  modified_base 1148: mod_base = OTHER; note = N1-methylpseudouracil
  modified_base 1151: mod_base = OTHER; note = N1-methylpseudouracil
  modified_base 1153: mod_base = OTHER; note = N1-methylpseudouracil
  modified_base 1157: mod_base = OTHER; note = N1-methylpseudouracil
  modified_base 1165: mod_base = OTHER; note = N1-methylpseudouracil
  modified_base 1172: mod_base = OTHER; note = N1-methylpseudouracil
  modified_base 1178: mod_base = OTHER; note = N1-methylpseudouracil
  modified_base 1181: mod_base = OTHER; note = N1-methylpseudouracil
  modified_base 1189: mod_base = OTHER; note = N1-methylpseudouracil
  modified_base 1193: mod_base = OTHER; note = N1-methylpseudouracil
  modified_base 1196: mod_base = OTHER; note = N1-methylpseudouracil
  modified_base 1199: mod_base = OTHER; note = N1-methylpseudouracil
  modified_base 1246: mod_base = OTHER; note = N1-methylpseudouracil
  modified_base 1253: mod_base = OTHER; note = N1-methylpseudouracil
  modified_base 1260: mod_base = OTHER; note = N1-methylpseudouracil
  modified_base 1278: mod_base = OTHER; note = N1-methylpseudouracil
  modified_base 1283: mod_base = OTHER; note = N1-methylpseudouracil
  modified_base 1286: mod_base = OTHER; note = N1-methylpseudouracil
  modified_base 1291: mod_base = OTHER; note = N1-methylpseudouracil
  modified_base 1292: mod_base = OTHER; note = N1-methylpseudouracil
  modified_base 1295: mod_base = OTHER; note = N1-methylpseudouracil
  modified_base 1304: mod_base = OTHER; note = N1-methylpseudouracil
  modified_base 1328: mod_base = OTHER; note = N1-methylpseudouracil
  modified_base 1331: mod_base = OTHER; note = N1-methylpseudouracil
  modified_base 1352: mod_base = OTHER; note = N1-methylpseudouracil
  modified_base 1359: mod_base = OTHER; note = N1-methylpseudouracil
  modified_base 1364: mod_base = OTHER; note = N1-methylpseudouracil
  modified_base 1367: mod_base = OTHER; note = N1-methylpseudouracil
  modified_base 1373: mod_base = OTHER; note = N1-methylpseudouracil
  modified_base 1378: mod_base = OTHER; note = N1-methylpseudouracil
  modified_base 1384: mod_base = OTHER; note = N1-methylpseudouracil
  modified_base 1387: mod_base = OTHER; note = N1-methylpseudouracil
  modified_base 1390: mod_base = OTHER; note = N1-methylpseudouracil
  modified_base 1395: mod_base = OTHER; note = N1-methylpseudouracil
  modified_base 1402: mod_base = OTHER; note = N1-methylpseudouracil
  modified_base 1406: mod_base = OTHER; note = N1-methylpseudouracil
  modified_base 1411: mod_base = OTHER; note = N1-methylpseudouracil
  modified_base 1415: mod_base = OTHER; note = N1-methylpseudouracil
  modified_base 1416: mod_base = OTHER; note = N1-methylpseudouracil
  modified_base 1418: mod_base = OTHER; note = N1-methylpseudouracil
  modified_base 1419: mod_base = OTHER; note = N1-methylpseudouracil
  modified_base 1425: mod_base = OTHER; note = N1-methylpseudouracil
  modified_base 1426: mod_base = OTHER; note = N1-methylpseudouracil
  modified_base 1432: mod_base = OTHER; note = N1-methylpseudouracil
  modified_base 1445: mod_base = OTHER; note = N1-methylpseudouracil
  modified_base 1448: mod_base = OTHER; note = N1-methylpseudouracil
  modified_base 1453: mod_base = OTHER; note = N1-methylpseudouracil
  modified_base 1454: mod_base = OTHER; note = N1-methylpseudouracil
  modified_base 1457: mod_base = OTHER; note = N1-methylpseudouracil
  modified_base 1465: mod_base = OTHER; note = N1-methylpseudouracil
  modified_base 1473: mod_base = OTHER; note = N1-methylpseudouracil
  modified_base 1476: mod_base = OTHER; note = N1-methylpseudouracil
  modified_base 1478: mod_base = OTHER; note = N1-methylpseudouracil
  modified_base 1479: mod_base = OTHER; note = N1-methylpseudouracil
  modified_base 1480: mod_base = OTHER; note = N1-methylpseudouracil
  modified_base 1484: mod_base = OTHER; note = N1-methylpseudouracil
  modified_base 1489: mod_base = OTHER; note = N1-methylpseudouracil
  modified_base 1491: mod_base = OTHER; note = N1-methylpseudouracil
  modified_base 1495: mod_base = OTHER; note = N1-methylpseudouracil
ggaaatcgcaaaatttgctcttcgcgttagatttcttttagttttctcgcaactagcaagctttttgttctcgccatggggtcgtcgaagtcgaagccgaaagatcctagtcagcgcaggaggggaggaggatccgcccacgccatggagaacagctggaccatcagcaaggagtaccacatcgacgaggaggtgggcttcgccctgcccaacccacaggagaacctgcccgacttctacaacgactggatgttcatcgccaagcacctgcccgacctgatcgagagcgggcagctgcgggaacgggtggagaagctgaacatgctgagcatcgaccacctgaccgaccacaagtcccagcggttggctcggctggtgctgggctgcatcaccatggcctacgtgtggggaaaggggcacggtgacgtgcggaaggtgctgccccgcaacatcgccgtgccctactgccagctgagcaagaagctggagctgcctccgatcctggtgtacgccgactgcgtgctggccaactggaagaagaaggaccccaacaagcccctgacctacgagaacatggacgtgctgttctccttccgggacggggactgcagcaaggggttcttcctggtgagcctgctggtggagatcgccgccgcctctgccatcaaggtgatccccaccgtgttcaaggccatgcagatgcaggagagggacaccctgctgaaggccctgctggagatcgccagctgcctggagaaggccctgcaggtgttccaccagatccacgaccacgtgaaccccaaggccttcttcagcgtgctgcgcatctacctgtccggctggaagggcaatccccagctgagcgacggcctggtgtacgagggcttctgggaggaccccaaggaatttgctggcggtagcgctggccagtccagcgtgttccagtgcttcgacgtgctgctgggcattcagcaaaccgctggaggcggacacgctgcccagttcctgcaggacatgcggcggtacatgccaccggcccaccgcaacttcctgtgctccctggagagcaacccctccgtgcgggagttcgtgctgtccaagggcgacgccggactgagggaggcctacgacgcctgcgtgaaggccctggtgtccctgcgcagctaccacctgcagatcgtgaccaagtacatcctgatccccgcaagccagcagcccaaggagaacaagaccagcgaggacccctccaagctggaagctaagggcaccggcggcactgacctgatgaacttcctgaagaccgtgcggagcaccaccgagaagagcctgctgaaggagggcgggaagccgatcccgaatcccctcctcgggctcgactcgacgtgataataggctggagcctcggtggcctagcttcttgccccttgggcctccccccagcccctcctccccttcctgcacccgtacccccgtggtctttgaataaagtctgagtgggcggc

SEQ ID NO: 309 - RNA, 1502 nt, synthetic construct
  source 1..1502: mol_type = other RNA
  modified_base 6: mod_base = OTHER; note = N1-methylpseudouracil
  modified_base 14: mod_base = OTHER; note = N1-methylpseudouracil
  modified_base 15: mod_base = OTHER; note = N1-methylpseudouracil
  modified_base 16: mod_base = OTHER; note = N1-methylpseudouracil
  modified_base 19: mod_base = OTHER; note = N1-methylpseudouracil
  modified_base 21: mod_base = OTHER; note = N1-methylpseudouracil
  modified_base 22: mod_base = OTHER; note = N1-methylpseudouracil
  modified_base 27: mod_base = OTHER; note = N1-methylpseudouracil
  modified_base 28: mod_base = OTHER; note = N1-methylpseudouracil
  modified_base 32: mod_base = OTHER; note = N1-methylpseudouracil
  modified_base 33: mod_base = OTHER; note = N1-methylpseudouracil
  modified_base 34: mod_base = OTHER; note = N1-methylpseudouracil
  modified_base 36: mod_base = OTHER; note = N1-methylpseudouracil
  modified_base 37: mod_base = OTHER; note = N1-methylpseudouracil
  modified_base 38: mod_base = OTHER; note = N1-methylpseudouracil
  modified_base 39: mod_base = OTHER; note = N1-methylpseudouracil
  modified_base 42: mod_base = OTHER; note = N1-methylpseudouracil
  modified_base 43: mod_base = OTHER; note = N1-methylpseudouracil
  modified_base 44: mod_base = OTHER; note = N1-methylpseudouracil
  modified_base 45: mod_base = OTHER; note = N1-methylpseudouracil
  modified_base 47: mod_base = OTHER; note = N1-methylpseudouracil
  modified_base 54: mod_base = OTHER; note = N1-methylpseudouracil
  modified_base 62: mod_base = OTHER; note = N1-methylpseudouracil
  modified_base 63: mod_base = OTHER; note = N1-methylpseudouracil
  modified_base 64: mod_base = OTHER; note = N1-methylpseudouracil
  modified_base 65: mod_base = OTHER; note = N1-methylpseudouracil
  modified_base 66: mod_base = OTHER; note = N1-methylpseudouracil
  modified_base 68: mod_base = OTHER; note = N1-methylpseudouracil
  modified_base 69: mod_base = OTHER; note = N1-methylpseudouracil
  modified_base 71: mod_base = OTHER; note = N1-methylpseudouracil
  modified_base 77: mod_base = OTHER; note = N1-methylpseudouracil
  modified_base 82: mod_base = OTHER; note = N1-methylpseudouracil
  modified_base 85: mod_base = OTHER; note = N1-methylpseudouracil
  modified_base 91: mod_base = OTHER; note = N1-methylpseudouracil
  modified_base 105: mod_base = OTHER; note = N1-methylpseudouracil
  modified_base 108: mod_base = OTHER; note = N1-methylpseudouracil
  modified_base 111: mod_base = OTHER; note = N1-methylpseudouracil
  modified_base 133: mod_base = OTHER; note = N1-methylpseudouracil
  modified_base 146: mod_base = OTHER; note = N1-methylpseudouracil
  modified_base 157: mod_base = OTHER; note = N1-methylpseudouracil
  modified_base 164: mod_base = OTHER; note = N1-methylpseudouracil
  modified_base 175: mod_base = OTHER; note = N1-methylpseudouracil
  modified_base 182: mod_base = OTHER; note = N1-methylpseudouracil
  modified_base 194: mod_base = OTHER; note = N1-methylpseudouracil
  modified_base 199: mod_base = OTHER; note = N1-methylpseudouracil
  modified_base 200: mod_base = OTHER; note = N1-methylpseudouracil
  modified_base 206: mod_base = OTHER; note = N1-methylpseudouracil
  modified_base 227: mod_base = OTHER; note = N1-methylpseudouracil
  modified_base 235: mod_base = OTHER; note = N1-methylpseudouracil
  modified_base 236: mod_base = OTHER; note = N1-methylpseudouracil
  modified_base 238: mod_base = OTHER; note = N1-methylpseudouracil
  modified_base 247: mod_base = OTHER; note = N1-methylpseudouracil
  modified_base 251: mod_base = OTHER; note = N1-methylpseudouracil
  modified_base 253: mod_base = OTHER; note = N1-methylpseudouracil
  modified_base 254: mod_base = OTHER; note = N1-methylpseudouracil
  modified_base 257: mod_base = OTHER; note = N1-methylpseudouracil
  modified_base 269: mod_base = OTHER; note = N1-methylpseudouracil
  modified_base 278: mod_base = OTHER; note = N1-methylpseudouracil
  modified_base 281: mod_base = OTHER; note = N1-methylpseudouracil
  modified_base 296: mod_base = OTHER; note = N1-methylpseudouracil
  modified_base 308: mod_base = OTHER; note = N1-methylpseudouracil
  modified_base 317: mod_base = OTHER; note = N1-methylpseudouracil
  modified_base 323: mod_base = OTHER; note = N1-methylpseudouracil
  modified_base 326: mod_base = OTHER; note = N1-methylpseudouracil
  modified_base 332: mod_base = OTHER; note = N1-methylpseudouracil
  modified_base 341: mod_base = OTHER; note = N1-methylpseudouracil
  modified_base 355: mod_base = OTHER; note = N1-methylpseudouracil
  modified_base 364: mod_base = OTHER; note = N1-methylpseudouracil
  modified_base 365: mod_base = OTHER; note = N1-methylpseudouracil
  modified_base 369: mod_base = OTHER; note = N1-methylpseudouracil
  modified_base 374: mod_base = OTHER; note = N1-methylpseudouracil
  modified_base 377: mod_base = OTHER; note = N1-methylpseudouracil
  modified_base 380: mod_base = OTHER; note = N1-methylpseudouracil
  modified_base 385: mod_base = OTHER; note = N1-methylpseudouracil
  modified_base 389: mod_base = OTHER; note = N1-methylpseudouracil
  modified_base 395: mod_base = OTHER; note = N1-methylpseudouracil
  modified_base 400: mod_base = OTHER; note = N1-methylpseudouracil
  modified_base 404: mod_base = OTHER; note = N1-methylpseudouracil
  modified_base 406: mod_base = OTHER; note = N1-methylpseudouracil
  modified_base 423: mod_base = OTHER; note = N1-methylpseudouracil
  modified_base 428: mod_base = OTHER; note = N1-methylpseudouracil
  modified_base 437: mod_base = OTHER; note = N1-methylpseudouracil
  modified_base 440: mod_base = OTHER; note = N1-methylpseudouracil
  modified_base 452: mod_base = OTHER; note = N1-methylpseudouracil
  modified_base 458: mod_base = OTHER; note = N1-methylpseudouracil
  modified_base 463: mod_base = OTHER; note = N1-methylpseudouracil
  modified_base 466: mod_base = OTHER; note = N1-methylpseudouracil
  modified_base 473: mod_base = OTHER; note = N1-methylpseudouracil
  modified_base 485: mod_base = OTHER; note = N1-methylpseudouracil
  modified_base 491: mod_base = OTHER; note = N1-methylpseudouracil
  modified_base 495: mod_base = OTHER; note = N1-methylpseudouracil
  modified_base 500: mod_base = OTHER; note = N1-methylpseudouracil
  modified_base 503: mod_base = OTHER; note = N1-methylpseudouracil
  modified_base 506: mod_base = OTHER; note = N1-methylpseudouracil
  modified_base 508: mod_base = OTHER; note = N1-methylpseudouracil
  modified_base 517: mod_base = OTHER; note = N1-methylpseudouracil
  modified_base 521: mod_base = OTHER; note = N1-methylpseudouracil
  modified_base 524: mod_base = OTHER; note = N1-methylpseudouracil
  modified_base 532: mod_base = OTHER; note = N1-methylpseudouracil
  modified_base 560: mod_base = OTHER; note = N1-methylpseudouracil
  modified_base 565: mod_base = OTHER; note = N1-methylpseudouracil
  modified_base 575: mod_base = OTHER; note = N1-methylpseudouracil
  modified_base 581: mod_base = OTHER; note = N1-methylpseudouracil
  modified_base 584: mod_base = OTHER; note = N1-methylpseudouracil
  modified_base 586: mod_base = OTHER; note = N1-methylpseudouracil
  modified_base 587: mod_base = OTHER; note = N1-methylpseudouracil
  modified_base 589: mod_base = OTHER; note = N1-methylpseudouracil
  modified_base 592: mod_base = OTHER; note = N1-methylpseudouracil
  modified_base 593: mod_base = OTHER; note = N1-methylpseudouracil
  modified_base 607: mod_base = OTHER; note = N1-methylpseudouracil
  modified_base 619: mod_base = OTHER; note = N1-methylpseudouracil
  modified_base 620: mod_base = OTHER; note = N1-methylpseudouracil
  modified_base 622: mod_base = OTHER; note = N1-methylpseudouracil
  modified_base 623: mod_base = OTHER; note = N1-methylpseudouracil
  modified_base 626: mod_base = OTHER; note = N1-methylpseudouracil
  modified_base 629: mod_base = OTHER; note = N1-methylpseudouracil
  modified_base 635: mod_base = OTHER; note = N1-methylpseudouracil
  modified_base 638: mod_base = OTHER; note = N1-methylpseudouracil
  modified_base 641: mod_base = OTHER; note = N1-methylpseudouracil
  modified_base 647: mod_base = OTHER; note = N1-methylpseudouracil
  modified_base 658: mod_base = OTHER; note = N1-methylpseudouracil
  modified_base 660: mod_base = OTHER; note = N1-methylpseudouracil
  modified_base 665: mod_base = OTHER; note = N1-methylpseudouracil
  modified_base 671: mod_base = OTHER; note = N1-methylpseudouracil
  modified_base 674: mod_base = OTHER; note = N1-methylpseudouracil
  modified_base 683: mod_base = OTHER; note = N1-methylpseudouracil
  modified_base 685: mod_base = OTHER; note = N1-methylpseudouracil
  modified_base 686: mod_base = OTHER; note = N1-methylpseudouracil
  modified_base 695: mod_base = OTHER; note = N1-methylpseudouracil
  modified_base 701: mod_base = OTHER; note = N1-methylpseudouracil
  modified_base 719: mod_base = OTHER; note = N1-methylpseudouracil
  modified_base 722: mod_base = OTHER; note = N1-methylpseudouracil
  modified_base 731: mod_base = OTHER; note = N1-methylpseudouracil
  modified_base 734: mod_base = OTHER; note = N1-methylpseudouracil
  modified_base 740: mod_base = OTHER; note = N1-methylpseudouracil
  modified_base 748: mod_base = OTHER; note = N1-methylpseudouracil
  modified_base 752: mod_base = OTHER; note = N1-methylpseudouracil
  modified_base 764: mod_base = OTHER; note = N1-methylpseudouracil
  modified_base 770: mod_base = OTHER; note = N1-methylpseudouracil
  modified_base 772: mod_base = OTHER; note = N1-methylpseudouracil
  modified_base 773: mod_base = OTHER; note = N1-methylpseudouracil
  modified_base 782: mod_base = OTHER; note = N1-methylpseudouracil
  modified_base 794: mod_base = OTHER; note = N1-methylpseudouracil
  modified_base 808: mod_base = OTHER; note = N1-methylpseudouracil
  modified_base 809: mod_base = OTHER; note = N1-methylpseudouracil
  modified_base 811: mod_base = OTHER; note = N1-methylpseudouracil
  modified_base 812: mod_base = OTHER; note = N1-methylpseudouracil
  modified_base 818: mod_base = OTHER; note = N1-methylpseudouracil
  modified_base 821: mod_base = OTHER; note = N1-methylpseudouracil
  modified_base 827: mod_base = OTHER; note = N1-methylpseudouracil
  modified_base 829: mod_base = OTHER; note = N1-methylpseudouracil
  modified_base 833: mod_base = OTHER; note = N1-methylpseudouracil
  modified_base 835: mod_base = OTHER; note = N1-methylpseudouracil
  modified_base 841: mod_base = OTHER; note = N1-methylpseudouracil
  modified_base 852: mod_base = OTHER; note = N1-methylpseudouracil
  modified_base 860: mod_base = OTHER; note = N1-methylpseudouracil
  modified_base 872: mod_base = OTHER; note = N1-methylpseudouracil
  modified_base 875: mod_base = OTHER; note = N1-methylpseudouracil
  modified_base 877: mod_base = OTHER; note = N1-methylpseudouracil
  modified_base 886: mod_base = OTHER; note = N1-methylpseudouracil
  modified_base 887: mod_base = OTHER; note = N1-methylpseudouracil
  modified_base 889: mod_base = OTHER; note = N1-methylpseudouracil
  modified_base 907: mod_base = OTHER; note = N1-methylpseudouracil
  modified_base 908: mod_base = OTHER; note = N1-methylpseudouracil
  modified_base 909: mod_base = OTHER; note = N1-methylpseudouracil
  modified_base 912: mod_base = OTHER; note = N1-methylpseudouracil
  modified_base 918: mod_base = OTHER; note = N1-methylpseudouracil
  modified_base 924: mod_base = OTHER; note = N1-methylpseudouracil
  modified_base 931: mod_base = OTHER; note = N1-methylpseudouracil
  modified_base 938: mod_base = OTHER; note = N1-methylpseudouracil
  modified_base 940: mod_base = OTHER; note = N1-methylpseudouracil
  modified_base 941: mod_base = OTHER; note = N1-methylpseudouracil
  modified_base 946: mod_base = OTHER; note = N1-methylpseudouracil
  modified_base 949: mod_base = OTHER; note = N1-methylpseudouracil
  modified_base 950: mod_base = OTHER; note = N1-methylpseudouracil
  modified_base 956: mod_base = OTHER; note = N1-methylpseudouracil
  modified_base 959: mod_base = OTHER; note = N1-methylpseudouracil
  modified_base 962: mod_base = OTHER; note = N1-methylpseudouracil
  modified_base 968: mod_base = OTHER; note = N1-methylpseudouracil
  modified_base 969: mod_base = OTHER; note = N1-methylpseudouracil
  modified_base 981: mod_base = OTHER; note = N1-methylpseudouracil
  modified_base 996: mod_base = OTHER; note = N1-methylpseudouracil
  modified_base 1003: mod_base = OTHER; note = N1-methylpseudouracil
  modified_base 1004: mod_base = OTHER; note = N1-methylpseudouracil
  modified_base 1007: mod_base = OTHER; note = N1-methylpseudouracil
  modified_base 1016: mod_base = OTHER; note = N1-methylpseudouracil
  modified_base 1024: mod_base = OTHER; note = N1-methylpseudouracil
  modified_base 1028: mod_base = OTHER; note = N1-methylpseudouracil
  modified_base 1048: mod_base = OTHER; note = N1-methylpseudouracil
  modified_base 1049: mod_base = OTHER; note = N1-methylpseudouracil
  modified_base 1052: mod_base = OTHER; note = N1-methylpseudouracil
  modified_base 1054: mod_base = OTHER; note = N1-methylpseudouracil
  modified_base 1057: mod_base = OTHER; note = N1-methylpseudouracil
  modified_base 1061: mod_base = OTHER; note = N1-methylpseudouracil
  modified_base 1075: mod_base = OTHER; note = N1-methylpseudouracil
  modified_base 1079: mod_base = OTHER; note = N1-methylpseudouracil
  modified_base 1087: mod_base = OTHER; note = N1-methylpseudouracil
  modified_base 1088: mod_base = OTHER; note = N1-methylpseudouracil
  modified_base 1091: mod_base = OTHER; note = N1-methylpseudouracil
  modified_base 1094: mod_base = OTHER; note = N1-methylpseudouracil
  modified_base 1096: mod_base = OTHER; note = N1-methylpseudouracil
  modified_base 1115: mod_base = OTHER; note = N1-methylpseudouracil
  modified_base 1126: mod_base = OTHER; note = N1-methylpseudouracil
  modified_base 1135: mod_base = OTHER; note = N1-methylpseudouracil
  modified_base 1139: mod_base = OTHER; note = N1-methylpseudouracil
  modified_base 1148: mod_base = OTHER; note = N1-methylpseudouracil
  modified_base 1151: mod_base = OTHER; note = N1-methylpseudouracil
  modified_base 1153: mod_base = OTHER; note = N1-methylpseudouracil
  modified_base 1157: mod_base = OTHER; note = N1-methylpseudouracil
  modified_base 1165: mod_base = OTHER; note = N1-methylpseudouracil
  modified_base 1172: mod_base = OTHER; note = N1-methylpseudouracil
  modified_base 1178: mod_base = OTHER; note = N1-methylpseudouracil
  modified_base 1181: mod_base = OTHER; note = N1-methylpseudouracil
  modified_base 1189: mod_base = OTHER; note = N1-methylpseudouracil
  modified_base 1193: mod_base = OTHER; note = N1-methylpseudouracil
  modified_base 1196: mod_base = OTHER; note = N1-methylpseudouracil
  modified_base 1199: mod_base = OTHER; note = N1-methylpseudouracil
  modified_base 1246: mod_base = OTHER; note = N1-methylpseudouracil
  modified_base 1253: mod_base = OTHER; note = N1-methylpseudouracil
  modified_base 1260: mod_base = OTHER; note = N1-methylpseudouracil
  modified_base 1278: mod_base = OTHER; note = N1-methylpseudouracil
  modified_base 1283: mod_base = OTHER; note = N1-methylpseudouracil
  modified_base 1286: mod_base = OTHER; note = N1-methylpseudouracil
  modified_base 1291: mod_base = OTHER; note = N1-methylpseudouracil
  modified_base 1292: mod_base = OTHER; note = N1-methylpseudouracil
  modified_base 1295: mod_base = OTHER; note = N1-methylpseudouracil
  modified_base 1304: mod_base = OTHER; note = N1-methylpseudouracil
  modified_base 1328: mod_base = OTHER; note = N1-methylpseudouracil
  modified_base 1331: mod_base = OTHER; note = N1-methylpseudouracil
  modified_base 1352: mod_base = OTHER; note = N1-methylpseudouracil
  modified_base 1359: mod_base = OTHER; note = N1-methylpseudouracil
  modified_base 1364: mod_base = OTHER; note = N1-methylpseudouracil
  modified_base 1367: mod_base = OTHER; note = N1-methylpseudouracil
  modified_base 1373: mod_base = OTHER; note = N1-methylpseudouracil
  modified_base 1378: mod_base = OTHER; note = N1-methylpseudouracil
  modified_base 1384: mod_base = OTHER; note = N1-methylpseudouracil
  modified_base 1387: mod_base = OTHER; note = N1-methylpseudouracil
  modified_base 1390: mod_base = OTHER; note = N1-methylpseudouracil
  modified_base 1395: mod_base = OTHER; note = N1-methylpseudouracil
  modified_base 1402: mod_base = OTHER; note = N1-methylpseudouracil
  modified_base 1405: mod_base = OTHER; note = N1-methylpseudouracil
  modified_base 1414: mod_base = OTHER; note = N1-methylpseudouracil
  modified_base 1416: mod_base = OTHER; note = N1-methylpseudouracil
  modified_base 1418: mod_base = OTHER; note = N1-methylpseudouracil
  modified_base 1423: mod_base = OTHER; note = N1-methylpseudouracil
  modified_base 1425: mod_base = OTHER; note = N1-methylpseudouracil
  modified_base 1426: mod_base = OTHER; note = N1-methylpseudouracil
  modified_base 1434: mod_base = OTHER; note = N1-methylpseudouracil
  modified_base 1444: mod_base = OTHER; note = N1-methylpseudouracil
  modified_base 1447: mod_base = OTHER; note = N1-methylpseudouracil
  modified_base 1448: mod_base = OTHER; note = N1-methylpseudouracil
  modified_base 1451: mod_base = OTHER; note = N1-methylpseudouracil
  modified_base 1453: mod_base = OTHER; note = N1-methylpseudouracil
  modified_base 1461: mod_base = OTHER; note = N1-methylpseudouracil
  modified_base 1462: mod_base = OTHER; note = N1-methylpseudouracil
  modified_base 1465: mod_base = OTHER; note = N1-methylpseudouracil
  modified_base 1473: mod_base = OTHER; note = N1-methylpseudouracil
  modified_base 1476: mod_base = OTHER; note = N1-methylpseudouracil
  modified_base 1478: mod_base = OTHER; note = N1-methylpseudouracil
  modified_base 1479: mod_base = OTHER; note = N1-methylpseudouracil
  modified_base 1480: mod_base = OTHER; note = N1-methylpseudouracil
  modified_base 1484: mod_base = OTHER; note = N1-methylpseudouracil
  modified_base 1489: mod_base = OTHER; note = N1-methylpseudouracil
  modified_base 1491: mod_base = OTHER; note = N1-methylpseudouracil
  modified_base 1495: mod_base = OTHER; note = N1-methylpseudouracil
ggaaatcgcaaaatttgctcttcgcgttagatttcttttagttttctcgcaactagcaagctttttgttctcgccatggggtcgtcgaagtcgaagccgaaagatcctagtcagcgcaggaggggaggaggatccgcccacgccatggagaacagctggaccatcagcaaggagtaccacatcgacgaggaggtgggcttcgccctgcccaacccacaggagaacctgcccgacttctacaacgactggatgttcatcgccaagcacctgcccgacctgatcgagagcgggcagctgcgggaacgggtggagaagctgaacatgctgagcatcgaccacctgaccgaccacaagtcccagcggttggctcggctggtgctgggctgcatcaccatggcctacgtgtggggaaaggggcacggtgacgtgcggaaggtgctgccccgcaacatcgccgtgccctactgccagctgagcaagaagctggagctgcctccgatcctggtgtacgccgactgcgtgctggccaactggaagaagaaggaccccaacaagcccctgacctacgagaacatggacgtgctgttctccttccgggacggggactgcagcaaggggttcttcctggtgagcctgctggtggagatcgccgccgcctctgccatcaaggtgatccccaccgtgttcaaggccatgcagatgcaggagagggacaccctgctgaaggccctgctggagatcgccagctgcctggagaaggccctgcaggtgttccaccagatccacgaccacgtgaaccccaaggccttcttcagcgtgctgcgcatctacctgtccggctggaagggcaatccccagctgagcgacggcctggtgtacgagggcttctgggaggaccccaaggaatttgctggcggtagcgctggccagtccagcgtgttccagtgcttcgacgtgctgctgggcattcagcaaaccgctggaggcggacacgctgcccagttcctgcaggacatgcggcggtacatgccaccggcccaccgcaacttcctgtgctccctggagagcaacccctccgtgcgggagttcgtgctgtccaagggcgacgccggactgagggaggcctacgacgcctgcgtgaaggccctggtgtccctgcgcagctaccacctgcagatcgtgaccaagtacatcctgatccccgcaagccagcagcccaaggagaacaagaccagcgaggacccctccaagctggaagctaagggcaccggcggcactgacctgatgaacttcctgaagaccgtgcggagcaccaccgagaagagcctgctgaaggagggcgggaagccgatcccgaatcccctcctcgggctcgactcgacgtaatagtaagctggagcctcctgagagacctgtgtgaactattgagaagatcggaacagctccttactctgaggaagttggtacccccgtggtctttgaataaagtctgagtgggcggc

SEQ ID NO: 310 - RNA, 1502 nt, synthetic construct
  source 1..1502: mol_type = other RNA
  modified_base 6: mod_base = OTHER; note = N1-methylpseudouracil
  modified_base 14: mod_base = OTHER; note = N1-methylpseudouracil
  modified_base 15: mod_base = OTHER; note = N1-methylpseudouracil
  modified_base 16: mod_base = OTHER; note = N1-methylpseudouracil
  modified_base 19: mod_base = OTHER; note = N1-methylpseudouracil
  modified_base 21: mod_base = OTHER; note = N1-methylpseudouracil
  modified_base 22: mod_base = OTHER; note = N1-methylpseudouracil
  modified_base 27: mod_base = OTHER; note = N1-methylpseudouracil
  modified_base 28: mod_base = OTHER; note = N1-methylpseudouracil
  modified_base 32: mod_base = OTHER; note = N1-methylpseudouracil
  modified_base 33: mod_base = OTHER; note = N1-methylpseudouracil
  modified_base 34: mod_base = OTHER; note = N1-methylpseudouracil
  modified_base 36: mod_base = OTHER; note = N1-methylpseudouracil
  modified_base 37: mod_base = OTHER; note = N1-methylpseudouracil
  modified_base 38: mod_base = OTHER; note = N1-methylpseudouracil
  modified_base 39: mod_base = OTHER; note = N1-methylpseudouracil
  modified_base 42: mod_base = OTHER; note = N1-methylpseudouracil
  modified_base 43: mod_base = OTHER; note = N1-methylpseudouracil
  modified_base 44: mod_base = OTHER; note = N1-methylpseudouracil
  modified_base 45: mod_base = OTHER; note = N1-methylpseudouracil
  modified_base 47: mod_base = OTHER; note = N1-methylpseudouracil
  modified_base 54: mod_base = OTHER; note = N1-methylpseudouracil
  modified_base 62: mod_base = OTHER; note = N1-methylpseudouracil
  modified_base 63: mod_base = OTHER; note = N1-methylpseudouracil
  modified_base 64: mod_base = OTHER; note = N1-methylpseudouracil
  modified_base 65: mod_base = OTHER; note = N1-methylpseudouracil
  modified_base 66: mod_base = OTHER; note = N1-methylpseudouracil
  modified_base 68: mod_base = OTHER; note = N1-methylpseudouracil
  modified_base 69: mod_base = OTHER; note = N1-methylpseudouracil
  modified_base 71: mod_base = OTHER; note = N1-methylpseudouracil
  modified_base 77: mod_base = OTHER; note = N1-methylpseudouracil
  modified_base 82: mod_base = OTHER; note = N1-methylpseudouracil
  modified_base 84: mod_base = OTHER; note = N1-methylpseudouracil
  modified_base 85: mod_base = OTHER; note = N1-methylpseudouracil
  modified_base 87: mod_base = OTHER; note = N1-methylpseudouracil
  modified_base 91: mod_base = OTHER; note = N1-methylpseudouracil
  modified_base 93: mod_base = OTHER; note = N1-methylpseudouracil
  modified_base 99: mod_base = OTHER; note = N1-methylpseudouracil
  modified_base 105: mod_base = OTHER; note = N1-methylpseudouracil
  modified_base 108: mod_base = OTHER; note = N1-methylpseudouracil
  modified_base 109: mod_base = OTHER; note = N1-methylpseudouracil
  modified_base 111: mod_base = OTHER; note = N1-methylpseudouracil
  modified_base 133: mod_base = OTHER; note = N1-methylpseudouracil
  modified_base 135: mod_base = OTHER; note = N1-methylpseudouracil
  modified_base 138: mod_base = OTHER; note = N1-methylpseudouracil
  modified_base 141: mod_base = OTHER; note = N1-methylpseudouracil
  modified_base 144: mod_base = OTHER; note = N1-methylpseudouracil
  modified_base 146: mod_base = OTHER; note = N1-methylpseudouracil
  modified_base 153: mod_base = OTHER; note = N1-methylpseudouracil
  modified_base 154: mod_base = OTHER; note = N1-methylpseudouracil
  modified_base 156: mod_base = OTHER; note = N1-methylpseudouracil
  modified_base 157: mod_base = OTHER; note = N1-methylpseudouracil
  modified_base 164: mod_base = OTHER; note = N1-methylpseudouracil
  modified_base 165: mod_base = OTHER; note = N1-methylpseudouracil
  modified_base 166: mod_base = OTHER; note = N1-methylpseudouracil
  modified_base 168: mod_base = OTHER; note = N1-methylpseudouracil
  modified_base 175: mod_base = OTHER; note = N1-methylpseudouracil
  modified_base 177: mod_base = OTHER; note = N1-methylpseudouracil
  modified_base 180: mod_base = OTHER; note = N1-methylpseudouracil
  modified_base 182: mod_base = OTHER; note = N1-methylpseudouracil
  modified_base 183: mod_base = OTHER; note = N1-methylpseudouracil
  modified_base 186: mod_base = OTHER; note = N1-methylpseudouracil
  modified_base 194: mod_base = OTHER; note = N1-methylpseudouracil
  modified_base 195: mod_base = OTHER; note = N1-methylpseudouracil
  modified_base 199: mod_base = OTHER; note = N1-methylpseudouracil
  modified_base 200: mod_base = OTHER; note = N1-methylpseudouracil
  modified_base 201: mod_base = OTHER; note = N1-methylpseudouracil
  modified_base 204: mod_base = OTHER; note = N1-methylpseudouracil
  modified_base 206: mod_base = OTHER; note = N1-methylpseudouracil
  modified_base 207: mod_base = OTHER; note = N1-methylpseudouracil
  modified_base 227: mod_base = OTHER; note = N1-methylpseudouracil
  modified_base 235: mod_base = OTHER; note = N1-methylpseudouracil
  modified_base 236: mod_base = OTHER; note = N1-methylpseudouracil
  modified_base 238: mod_base = OTHER; note = N1-methylpseudouracil
  modified_base 247: mod_base = OTHER; note = N1-methylpseudouracil
  modified_base 251: mod_base = OTHER; note = N1-methylpseudouracil
  modified_base 253: mod_base = OTHER; note = N1-methylpseudouracil
  modified_base 254: mod_base = OTHER; note = N1-methylpseudouracil
  modified_base 257: mod_base = OTHER; note = N1-methylpseudouracil
  modified_base 269: mod_base = OTHER; note = N1-methylpseudouracil
  modified_base 278: mod_base = OTHER; note = N1-methylpseudouracil
  modified_base 281: mod_base = OTHER; note = N1-methylpseudouracil
  modified_base 296: mod_base = OTHER; note = N1-methylpseudouracil
  modified_base 308: mod_base = OTHER; note = N1-methylpseudouracil
  modified_base 317: mod_base = OTHER; note = N1-methylpseudouracil
  modified_base 323: mod_base = OTHER; note = N1-methylpseudouracil
  modified_base 326: mod_base = OTHER; note = N1-methylpseudouracil
  modified_base 332: mod_base = OTHER; note = N1-methylpseudouracil
  modified_base 341: mod_base = OTHER; note = N1-methylpseudouracil
  modified_base 355: mod_base = OTHER; note = N1-methylpseudouracil
  modified_base 364: mod_base = OTHER; note = N1-methylpseudouracil
  modified_base 365: mod_base = OTHER; note = N1-methylpseudouracil
  modified_base 369: mod_base = OTHER; note = N1-methylpseudouracil
  modified_base 374: mod_base = OTHER; note = N1-methylpseudouracil
  modified_base 377: mod_base = OTHER; note = N1-methylpseudouracil
  modified_base 380: mod_base = OTHER; note = N1-methylpseudouracil
  modified_base 385: mod_base = OTHER; note = N1-methylpseudouracil
  modified_base 389: mod_base = OTHER; note = N1-methylpseudouracil
  modified_base 395: mod_base = OTHER; note = N1-methylpseudouracil
  modified_base 400: mod_base = OTHER; note = N1-methylpseudouracil
  modified_base 404: mod_base = OTHER; note = N1-methylpseudouracil
  modified_base 406: mod_base = OTHER; note = N1-methylpseudouracil
  modified_base 423: mod_base = OTHER; note = N1-methylpseudouracil
  modified_base 428: mod_base = OTHER; note = N1-methylpseudouracil
  modified_base 437: mod_base = OTHER; note = N1-methylpseudouracil
  modified_base 440: mod_base = OTHER; note = N1-methylpseudouracil
  modified_base 452: mod_base = OTHER; note = N1-methylpseudouracil
  modified_base 458: mod_base = OTHER; note = N1-methylpseudouracil
  modified_base 463: mod_base = OTHER; note = N1-methylpseudouracil
  modified_base 466: mod_base = OTHER; note = N1-methylpseudouracil
  modified_base 473: mod_base = OTHER; note = N1-methylpseudouracil
  modified_base 485: mod_base = OTHER; note = N1-methylpseudouracil
  modified_base 491: mod_base = OTHER; note = N1-methylpseudouracil
  modified_base 495: mod_base = OTHER; note = N1-methylpseudouracil
  modified_base 500: mod_base = OTHER; note = N1-methylpseudouracil
  modified_base 503: mod_base = OTHER; note = N1-methylpseudouracil
  modified_base 506: mod_base = OTHER; note = N1-methylpseudouracil
  modified_base 508: mod_base = OTHER; note = N1-methylpseudouracil
  modified_base 517: mod_base = OTHER; note = N1-methylpseudouracil
  modified_base 521: mod_base = OTHER; note = N1-methylpseudouracil
  modified_base 524: mod_base = OTHER; note = N1-methylpseudouracil
  modified_base 532: mod_base = OTHER; note = N1-methylpseudouracil
  modified_base 560: mod_base = OTHER; note = N1-methylpseudouracil
  modified_base 565: mod_base = OTHER; note = N1-methylpseudouracil
  modified_base 575: mod_base = OTHER; note = N1-methylpseudouracil
  modified_base 581: mod_base = OTHER; note = N1-methylpseudouracil
  modified_base 584: mod_base = OTHER; note = N1-methylpseudouracil
  modified_base 586: mod_base = OTHER; note = N1-methylpseudouracil
  modified_base 587: mod_base = OTHER; note = N1-methylpseudouracil
  modified_base 589: mod_base = OTHER; note = N1-methylpseudouracil
  modified_base 592: mod_base = OTHER; note = N1-methylpseudouracil
  modified_base 593: mod_base = OTHER; note = N1-methylpseudouracil
  modified_base 607: mod_base = OTHER; note = N1-methylpseudouracil
  modified_base 619: mod_base = OTHER; note = N1-methylpseudouracil
  modified_base 620: mod_base = OTHER; note = N1-methylpseudouracil
  modified_base 622: mod_base = OTHER; note = N1-methylpseudouracil
  modified_base 623: mod_base = OTHER; note = N1-methylpseudouracil
  modified_base 626: mod_base = OTHER; note = N1-methylpseudouracil
  modified_base 629: mod_base = OTHER; note = N1-methylpseudouracil
  modified_base 635: mod_base = OTHER; note = N1-methylpseudouracil
  modified_base 638: mod_base = OTHER; note = N1-methylpseudouracil
  modified_base 641: mod_base = OTHER; note = N1-methylpseudouracil
  modified_base 647: mod_base = OTHER; note = N1-methylpseudouracil
  modified_base 658: mod_base = OTHER; note = N1-methylpseudouracil
  modified_base 660: mod_base = OTHER; note = N1-methylpseudouracil
  modified_base 665: mod_base = OTHER; note = N1-methylpseudouracil
  modified_base 671: mod_base = OTHER; note = N1-methylpseudouracil
  modified_base 674: mod_base = OTHER; note = N1-methylpseudouracil
  modified_base 683: mod_base = OTHER; note = N1-methylpseudouracil
  modified_base 685: mod_base = OTHER; note = N1-methylpseudouracil
  modified_base 686: mod_base = OTHER; note = N1-methylpseudouracil
  modified_base 695: mod_base = OTHER; note = N1-methylpseudouracil
  modified_base 701: mod_base = OTHER; note = N1-methylpseudouracil
  modified_base 719: mod_base = OTHER; note = N1-methylpseudouracil
  modified_base 722: mod_base = OTHER; note = N1-methylpseudouracil
  modified_base 731: mod_base = OTHER; note = N1-methylpseudouracil
  modified_base 734: mod_base = OTHER; note = N1-methylpseudouracil
  modified_base 740: mod_base = OTHER; note = N1-methylpseudouracil
  modified_base 748: mod_base = OTHER; note = N1-methylpseudouracil
  modified_base 752: mod_base = OTHER; note = N1-methylpseudouracil
  modified_base 764: mod_base = OTHER; note = N1-methylpseudouracil
  modified_base 770: mod_base = OTHER; note = N1-methylpseudouracil
  modified_base 772: mod_base = OTHER; note = N1-methylpseudouracil
  modified_base 773: mod_base = OTHER; note = N1-methylpseudouracil
  modified_base 782: mod_base = OTHER; note = N1-methylpseudouracil
  modified_base 794: mod_base = OTHER; note = N1-methylpseudouracil
  modified_base 808: mod_base = OTHER; note = N1-methylpseudouracil
  modified_base 809: mod_base = OTHER; note = N1-methylpseudouracil
  modified_base 811: mod_base = OTHER; note = N1-methylpseudouracil
  modified_base 812: mod_base = OTHER; note = N1-methylpseudouracil
  modified_base 818: mod_base = OTHER; note = N1-methylpseudouracil
  modified_base 821: mod_base = OTHER; note = N1-methylpseudouracil
  modified_base 827: mod_base = OTHER; note = N1-methylpseudouracil
  modified_base 829: mod_base = OTHER; note = N1-methylpseudouracil
  modified_base 833: mod_base = OTHER; note = N1-methylpseudouracil
  modified_base 835: mod_base = OTHER; note = N1-methylpseudouracil
  modified_base 841: mod_base = OTHER; note = N1-methylpseudouracil
  modified_base 852: mod_base = OTHER; note = N1-methylpseudouracil
  modified_base 860: mod_base = OTHER; note = N1-methylpseudouracil
  modified_base 872: mod_base = OTHER; note = N1-methylpseudouracil
  modified_base 875: mod_base = OTHER; note = N1-methylpseudouracil
  modified_base 877: mod_base = OTHER; note = N1-methylpseudouracil
  modified_base 886: mod_base = OTHER; note = N1-methylpseudouracil
  modified_base 887: mod_base = OTHER; note = N1-methylpseudouracil
  modified_base 889: mod_base = OTHER; note = N1-methylpseudouracil
  modified_base 907: mod_base = OTHER; note = N1-methylpseudouracil
  modified_base 908: mod_base = OTHER; note = N1-methylpseudouracil
  modified_base 909: mod_base = OTHER; note = N1-methylpseudouracil
  modified_base 912: mod_base = OTHER; note = N1-methylpseudouracil
  modified_base 918: mod_base = OTHER; note = N1-methylpseudouracil
  modified_base 924: mod_base = OTHER; note = N1-methylpseudouracil
  modified_base 931: mod_base = OTHER; note = N1-methylpseudouracil
  modified_base 938: mod_base = OTHER; note = N1-methylpseudouracil
  modified_base 940: mod_base = OTHER; note = N1-methylpseudouracil
  modified_base 941: mod_base = OTHER; note = N1-methylpseudouracil
  modified_base 946: mod_base = OTHER; note = N1-methylpseudouracil
  modified_base 949: mod_base = OTHER; note = N1-methylpseudouracil
  modified_base 950: mod_base = OTHER; note = N1-methylpseudouracil
  modified_base 956: mod_base = OTHER; note = N1-methylpseudouracil
  modified_base 959: mod_base = OTHER; note = N1-methylpseudouracil
  modified_base 962: mod_base = OTHER; note = N1-methylpseudouracil
  modified_base 968: mod_base = OTHER; note = N1-methylpseudouracil
  modified_base 969: mod_base = OTHER; note = N1-methylpseudouracil
  modified_base 981: mod_base = OTHER; note = N1-methylpseudouracil
  modified_base 996: mod_base = OTHER; note = N1-methylpseudouracil
  modified_base 1003: mod_base = OTHER; note = N1-methylpseudouracil
  modified_base 1004: mod_base = OTHER; note = N1-methylpseudouracil
  modified_base 1007: mod_base = OTHER; note = N1-methylpseudouracil
  modified_base 1016: mod_base = OTHER; note = N1-methylpseudouracil
  modified_base 1024: mod_base = OTHER; note = N1-methylpseudouracil
  modified_base 1028: mod_base = OTHER; note = N1-methylpseudouracil
  modified_base 1048: mod_base = OTHER; note = N1-methylpseudouracil
  modified_base 1049: mod_base = OTHER; note = N1-methylpseudouracil
  modified_base 1052: mod_base = OTHER; note = N1-methylpseudouracil
  modified_base 1054: mod_base = OTHER; note = N1-methylpseudouracil
  modified_base 1057: mod_base = OTHER; note = N1-methylpseudouracil
  modified_base 1061: mod_base = OTHER; note = N1-methylpseudouracil
  modified_base 1075: mod_base = OTHER; note = N1-methylpseudouracil
  modified_base 1079: mod_base = OTHER; note = N1-methylpseudouracil
  modified_base 1087: mod_base = OTHER; note = N1-methylpseudouracil
  modified_base 1088: mod_base = OTHER; note = N1-methylpseudouracil
  modified_base 1091: mod_base = OTHER; note = N1-methylpseudouracil
  modified_base 1094: mod_base = OTHER; note = N1-methylpseudouracil
  modified_base 1096: mod_base = OTHER; note = N1-methylpseudouracil
  modified_base 1115: mod_base = OTHER; note = N1-methylpseudouracil
  modified_base 1126: mod_base = OTHER; note = N1-methylpseudouracil
  modified_base 1135: mod_base = OTHER; note = N1-methylpseudouracil
  modified_base 1139: mod_base = OTHER; note = N1-methylpseudouracil
  modified_base 1148: mod_base = OTHER; note = N1-methylpseudouracil
  modified_base 1151: mod_base = OTHER; note = N1-methylpseudouracil
  modified_base 1153: mod_base = OTHER; note = N1-methylpseudouracil
  modified_base 1157: mod_base = OTHER; note = N1-methylpseudouracil
  modified_base 1165: mod_base = OTHER; note = N1-methylpseudouracil
  modified_base 1172: mod_base = OTHER; note = N1-methylpseudouracil
  modified_base 1178: mod_base = OTHER; note = N1-methylpseudouracil
  modified_base 1181: mod_base = OTHER; note = N1-methylpseudouracil
  modified_base 1189: mod_base = OTHER; note = N1-methylpseudouracil
  modified_base 1193: mod_base = OTHER; note = N1-methylpseudouracil
  modified_base 1196: mod_base = OTHER; note = N1-methylpseudouracil
  modified_base 1199: mod_base = OTHER; note = N1-methylpseudouracil
  modified_base 1246: mod_base = OTHER; note = N1-methylpseudouracil
  modified_base 1253: mod_base = OTHER; note = N1-methylpseudouracil
  modified_base 1260: mod_base = OTHER; note = N1-methylpseudouracil
  modified_base 1278: mod_base = OTHER; note = N1-methylpseudouracil
  modified_base 1283: mod_base = OTHER; note = N1-methylpseudouracil
  modified_base 1286: mod_base = OTHER; note = N1-methylpseudouracil
  modified_base 1291: mod_base = OTHER; note = N1-methylpseudouracil
  modified_base 1292: mod_base = OTHER; note = N1-methylpseudouracil
  modified_base 1295: mod_base = OTHER; note = N1-methylpseudouracil
  modified_base 1304: mod_base = OTHER; note = N1-methylpseudouracil
  modified_base 1328: mod_base = OTHER; note = N1-methylpseudouracil
  modified_base 1331: mod_base = OTHER; note = N1-methylpseudouracil
  modified_base 1352: mod_base = OTHER; note = N1-methylpseudouracil
  modified_base 1359: mod_base = OTHER; note = N1-methylpseudouracil
  modified_base 1364: mod_base = OTHER; note = N1-methylpseudouracil
  modified_base 1367: mod_base = OTHER; note = N1-methylpseudouracil
  modified_base 1373: mod_base = OTHER; note = N1-methylpseudouracil
  modified_base 1378: mod_base = OTHER; note = N1-methylpseudouracil
  modified_base 1384: mod_base = OTHER; note = N1-methylpseudouracil
  modified_base 1387: mod_base = OTHER; note = N1-methylpseudouracil
  modified_base 1390: mod_base = OTHER; note = N1-methylpseudouracil
  modified_base 1395: mod_base = OTHER; note = N1-methylpseudouracil
  modified_base 1402: mod_base = OTHER; note = N1-methylpseudouracil
  modified_base 1406: mod_base = OTHER; note = N1-methylpseudouracil
  modified_base 1411: mod_base = OTHER; note = N1-methylpseudouracil
  modified_base 1415: mod_base = OTHER; note = N1-methylpseudouracil
  modified_base 1416: mod_base = OTHER; note = N1-methylpseudouracil
  modified_base 1418: mod_base = OTHER; note = N1-methylpseudouracil
  modified_base 1419: mod_base = OTHER; note = N1-methylpseudouracil
  modified_base 1425: mod_base = OTHER; note = N1-methylpseudouracil
  modified_base 1426: mod_base = OTHER; note = N1-methylpseudouracil
  modified_base 1432: mod_base = OTHER; note = N1-methylpseudouracil
  modified_base 1445: mod_base = OTHER; note = N1-methylpseudouracil
  modified_base 1448: mod_base = OTHER; note = N1-methylpseudouracil
  modified_base 1453: mod_base = OTHER; note = N1-methylpseudouracil
  modified_base 1454: mod_base = OTHER; note = N1-methylpseudouracil
  modified_base 1457: mod_base = OTHER; note = N1-methylpseudouracil
  modified_base 1465: mod_base = OTHER; note = N1-methylpseudouracil
  modified_base 1473: mod_base = OTHER; note = N1-methylpseudouracil
  modified_base 1476: mod_base = OTHER; note = N1-methylpseudouracil
  modified_base 1478: mod_base = OTHER; note = N1-methylpseudouracil
  modified_base 1479: mod_base = OTHER; note = N1-methylpseudouracil
  modified_base 1480: mod_base = OTHER; note = N1-methylpseudouracil
  modified_base 1484: mod_base = OTHER; note = N1-methylpseudouracil
  modified_base 1489: mod_base = OTHER; note = N1-methylpseudouracil
  modified_base 1491: mod_base = OTHER; note = N1-methylpseudouracil
  modified_base 1495: mod_base = OTHER; note = N1-methylpseudouracil
ggaaatcgcaaaatttgctcttcgcgttagatttcttttagttttctcgcaactagcaagctttttgttctcgccatgggatcttctaaatctaaacctaaagatccttctcaaagaagaagaggaggaggatctgctcatgctatggagaattcttggacaatttctaaagaatatcatattgatgaagaagttggatttgctcttcccaacccacaggagaacctgcccgacttctacaacgactggatgttcatcgccaagcacctgcccgacctgatcgagagcgggcagctgcgggaacgggtggagaagctgaacatgctgagcatcgaccacctgaccgaccacaagtcccagcggttggctcggctggtgctgggctgcatcaccatggcctacgtgtggggaaaggggcacggtgacgtgcggaaggtgctgccccgcaacatcgccgtgccctactgccagctgagcaagaagctggagctgcctccgatcctggtgtacgccgactgcgtgctggccaactggaagaagaaggaccccaacaagcccctgacctacgagaacatggacgtgctgttctccttccgggacggggactgcagcaaggggttcttcctggtgagcctgctggtggagatcgccgccgcctctgccatcaaggtgatccccaccgtgttcaaggccatgcagatgcaggagagggacaccctgctgaaggccctgctggagatcgccagctgcctggagaaggccctgcaggtgttccaccagatccacgaccacgtgaaccccaaggccttcttcagcgtgctgcgcatctacctgtccggctggaagggcaatccccagctgagcgacggcctggtgtacgagggcttctgggaggaccccaaggaatttgctggcggtagcgctggccagtccagcgtgttccagtgcttcgacgtgctgctgggcattcagcaaaccgctggaggcggacacgctgcccagttcctgcaggacatgcggcggtacatgccaccggcccaccgcaacttcctgtgctccctggagagcaacccctccgtgcgggagttcgtgctgtccaagggcgacgccggactgagggaggcctacgacgcctgcgtgaaggccctggtgtccctgcgcagctaccacctgcagatcgtgaccaagtacatcctgatccccgcaagccagcagcccaaggagaacaagaccagcgaggacccctccaagctggaagctaagggcaccggcggcactgacctgatgaacttcctgaagaccgtgcggagcaccaccgagaagagcctgctgaaggagggcgggaagccgatcccgaatcccctcctcgggctcgactcgacgtgataataggctggagcctcggtggcctagcttcttgccccttgggcctccccccagcccctcctccccttcctgcacccgtacccccgtggtctttgaataaagtctgagtgggcggc

SEQ ID NO: 311 - RNA, 1460 nt, synthetic construct
  source 1..1460: mol_type = other RNA
  modified_base 6: mod_base = OTHER; note = N1-methylpseudouracil
  modified_base 14: mod_base = OTHER; note = N1-methylpseudouracil
  modified_base 15: mod_base = OTHER; note = N1-methylpseudouracil
  modified_base 16: mod_base = OTHER; note = N1-methylpseudouracil
  modified_base 19: mod_base = OTHER; note = N1-methylpseudouracil
  modified_base 21: mod_base = OTHER; note = N1-methylpseudouracil
  modified_base 22: mod_base = OTHER; note = N1-methylpseudouracil
  modified_base 27: mod_base = OTHER; note = N1-methylpseudouracil
  modified_base 28: mod_base = OTHER; note = N1-methylpseudouracil
  modified_base 32: mod_base = OTHER; note = N1-methylpseudouracil
  modified_base 33: mod_base = OTHER; note = N1-methylpseudouracil
  modified_base 34: mod_base = OTHER; note = N1-methylpseudouracil
  modified_base 36: mod_base = OTHER; note = N1-methylpseudouracil
  modified_base 37: mod_base = OTHER; note = N1-methylpseudouracil
  modified_base 38: mod_base = OTHER; note = N1-methylpseudouracil
  modified_base 39: mod_base = OTHER; note = N1-methylpseudouracil
  modified_base 42: mod_base = OTHER; note = N1-methylpseudouracil
  modified_base 43: mod_base = OTHER; note = N1-methylpseudouracil
  modified_base 44: mod_base = OTHER; note = N1-methylpseudouracil
  modified_base 45: mod_base = OTHER; note = N1-methylpseudouracil
  modified_base 47: mod_base = OTHER; note = N1-methylpseudouracil
  modified_base 54: mod_base = OTHER; note = N1-methylpseudouracil
  modified_base 62: mod_base = OTHER; note = N1-methylpseudouracil
  modified_base 63: mod_base = OTHER; note = N1-methylpseudouracil
  modified_base 64: mod_base = OTHER; note = N1-methylpseudouracil
  modified_base 65: mod_base = OTHER; note = N1-methylpseudouracil
  modified_base 66: mod_base = OTHER; note = N1-methylpseudouracil
  modified_base 68: mod_base = OTHER; note = N1-methylpseudouracil
  modified_base 69: mod_base = OTHER; note = N1-methylpseudouracil
  modified_base 71: mod_base = OTHER; note = N1-methylpseudouracil
  modified_base 77: mod_base = OTHER; note = N1-methylpseudouracil
  modified_base 82: mod_base = OTHER; note = N1-methylpseudouracil
  modified_base 85: mod_base = OTHER; note = N1-methylpseudouracil
  modified_base 91: mod_base = OTHER; note = N1-methylpseudouracil
  modified_base 105: mod_base = OTHER; note = N1-methylpseudouracil
  modified_base 108: mod_base = OTHER; note = N1-methylpseudouracil
  modified_base 111: mod_base = OTHER; note = N1-methylpseudouracil
  modified_base 133: mod_base = OTHER; note = N1-methylpseudouracil
  modified_base 146: mod_base = OTHER; note = N1-methylpseudouracil
  modified_base 157: mod_base = OTHER; note = N1-methylpseudouracil
  modified_base 164: mod_base = OTHER; note = N1-methylpseudouracil
  modified_base 175: mod_base = OTHER; note = N1-methylpseudouracil
  modified_base 182: mod_base = OTHER; note = N1-methylpseudouracil
  modified_base 194: mod_base = OTHER; note = N1-methylpseudouracil
  modified_base 199: mod_base = OTHER; note = N1-methylpseudouracil
  modified_base 200: mod_base = OTHER; note = N1-methylpseudouracil
  modified_base 206: mod_base = OTHER; note = N1-methylpseudouracil
  modified_base 227: mod_base = OTHER; note = N1-methylpseudouracil
  modified_base 235: mod_base = OTHER; note = N1-methylpseudouracil
  modified_base 236: mod_base = OTHER; note = N1-methylpseudouracil
  modified_base 238: mod_base = OTHER; note = N1-methylpseudouracil
  modified_base 247: mod_base = OTHER; note = N1-methylpseudouracil
  modified_base 251: mod_base = OTHER; note = N1-methylpseudouracil
  modified_base 253: mod_base = OTHER; note = N1-methylpseudouracil
  modified_base 254: mod_base = OTHER; note = N1-methylpseudouracil
  modified_base 257: mod_base = OTHER; note = N1-methylpseudouracil
  modified_base 269: mod_base = OTHER; note = N1-methylpseudouracil
  modified_base 278: mod_base = OTHER; note = N1-methylpseudouracil
  modified_base 281: mod_base = OTHER; note = N1-methylpseudouracil
  modified_base 296: mod_base = OTHER; note = N1-methylpseudouracil
  modified_base 308: mod_base = OTHER; note = N1-methylpseudouracil
  modified_base 317: mod_base = OTHER; note = N1-methylpseudouracil
  modified_base 323: mod_base = OTHER; note = N1-methylpseudouracil
  modified_base 326: mod_base = OTHER; note = N1-methylpseudouracil
  modified_base 332: mod_base = OTHER; note = N1-methylpseudouracil
  modified_base 341: mod_base = OTHER; note = N1-methylpseudouracil
  modified_base 355: mod_base = OTHER; note = N1-methylpseudouracil
  modified_base 364: mod_base = OTHER; note = N1-methylpseudouracil
  modified_base 365: mod_base = OTHER; note = N1-methylpseudouracil
  modified_base 369: mod_base = OTHER; note = N1-methylpseudouracil
  modified_base 374: mod_base = OTHER; note = N1-methylpseudouracil
  modified_base 377: mod_base = OTHER; note = N1-methylpseudouracil
  modified_base 380: mod_base = OTHER; note = N1-methylpseudouracil
  modified_base 385: mod_base = OTHER; note = N1-methylpseudouracil
  modified_base 389: mod_base = OTHER; note = N1-methylpseudouracil
  modified_base 395: mod_base = OTHER; note = N1-methylpseudouracil
  modified_base 400: mod_base = OTHER; note = N1-methylpseudouracil
  modified_base 404: mod_base = OTHER; note = N1-methylpseudouracil
  modified_base 406: mod_base = OTHER; note = N1-methylpseudouracil
  modified_base 423: mod_base = OTHER; note = N1-methylpseudouracil
  modified_base 428: mod_base = OTHER; note = N1-methylpseudouracil
  modified_base 437: mod_base = OTHER; note = N1-methylpseudouracil
  modified_base 440: mod_base = OTHER; note = N1-methylpseudouracil
  modified_base 452: mod_base = OTHER; note = N1-methylpseudouracil
  modified_base 458: mod_base = OTHER; note = N1-methylpseudouracil
  modified_base 463: mod_base = OTHER; note = N1-methylpseudouracil
  modified_base 466: mod_base = OTHER; note = N1-methylpseudouracil
  modified_base 473: mod_base = OTHER; note = N1-methylpseudouracil
  modified_base 485: mod_base = OTHER; note = N1-methylpseudouracil
  modified_base 491: mod_base = OTHER; note = N1-methylpseudouracil
  modified_base 495: mod_base = OTHER; note = N1-methylpseudouracil
  modified_base 500: mod_base = OTHER; note = N1-methylpseudouracil
  modified_base 503: mod_base = OTHER; note = N1-methylpseudouracil
  modified_base 506: mod_base = OTHER; note = N1-methylpseudouracil
  modified_base 508: mod_base = OTHER; note = N1-methylpseudouracil
  modified_base 517: mod_base = OTHER; note = N1-methylpseudouracil
  modified_base 521: mod_base = OTHER; note = N1-methylpseudouracil
  modified_base 524: mod_base = OTHER; note = N1-methylpseudouracil
  modified_base 532: mod_base = OTHER; note = N1-methylpseudouracil
  modified_base 560: mod_base = OTHER; note = N1-methylpseudouracil
  modified_base 565: mod_base = OTHER; note = N1-methylpseudouracil
  modified_base 575: mod_base = OTHER; note = N1-methylpseudouracil
  modified_base 581: mod_base = OTHER; note = N1-methylpseudouracil
  modified_base 584: mod_base = OTHER; note = N1-methylpseudouracil
  modified_base 586: mod_base = OTHER; note = N1-methylpseudouracil
  modified_base 587: mod_base = OTHER; note = N1-methylpseudouracil
  modified_base 589: mod_base = OTHER; note = N1-methylpseudouracil
  modified_base 592: mod_base = OTHER; note = N1-methylpseudouracil
  modified_base 593: mod_base = OTHER; note = N1-methylpseudouracil
  modified_base 607: mod_base = OTHER; note = N1-methylpseudouracil
  modified_base 619: mod_base = OTHER; note = N1-methylpseudouracil
  modified_base 620: mod_base = OTHER; note = N1-methylpseudouracil
  modified_base 622: mod_base = OTHER; note = N1-methylpseudouracil
  modified_base 623: mod_base = OTHER; note = N1-methylpseudouracil
  modified_base 626: mod_base = OTHER; note = N1-methylpseudouracil
  modified_base 629: mod_base = OTHER; note = N1-methylpseudouracil
  modified_base 635: mod_base = OTHER; note = N1-methylpseudouracil
  modified_base 638: mod_base = OTHER; note = N1-methylpseudouracil
  modified_base 641: mod_base = OTHER; note = N1-methylpseudouracil
  modified_base 647: mod_base = OTHER; note = N1-methylpseudouracil
  modified_base 658: mod_base = OTHER; note = N1-methylpseudouracil
  modified_base 660: mod_base = OTHER; note = N1-methylpseudouracil
  modified_base 665: mod_base = OTHER; note = N1-methylpseudouracil
  modified_base 671: mod_base = OTHER; note = N1-methylpseudouracil
  modified_base 674: mod_base = OTHER; note = N1-methylpseudouracil
  modified_base 683: mod_base = OTHER; note = N1-methylpseudouracil
  modified_base 685: mod_base = OTHER; note = N1-methylpseudouracil
  modified_base 686: mod_base = OTHER; note = N1-methylpseudouracil
  modified_base 695: mod_base = OTHER; note = N1-methylpseudouracil
  modified_base 701: mod_base = OTHER; note = N1-methylpseudouracil
  modified_base 719: mod_base = OTHER; note = N1-methylpseudouracil
  modified_base 722: mod_base = OTHER; note = N1-methylpseudouracil
  modified_base 731: mod_base = OTHER; note = N1-methylpseudouracil
  modified_base 734: mod_base = OTHER; note = N1-methylpseudouracil
  modified_base 740: mod_base = OTHER; note = N1-methylpseudouracil
  modified_base 748: mod_base = OTHER; note = N1-methylpseudouracil
  modified_base 752: mod_base = OTHER; note = N1-methylpseudouracil
  modified_base 764: mod_base = OTHER; note = N1-methylpseudouracil
  modified_base 770: mod_base = OTHER; note = N1-methylpseudouracil
  modified_base 772: mod_base = OTHER; note = N1-methylpseudouracil
  modified_base 773: mod_base = OTHER; note = N1-methylpseudouracil
  modified_base 782: mod_base = OTHER; note = N1-methylpseudouracil
  modified_base 794: mod_base = OTHER; note = N1-methylpseudouracil
  modified_base 808: mod_base = OTHER; note = N1-methylpseudouracil
  modified_base 809: mod_base = OTHER; note = N1-methylpseudouracil
  modified_base 811: mod_base = OTHER; note = N1-methylpseudouracil
  modified_base 812: mod_base = OTHER; note = N1-methylpseudouracil
  modified_base 818: mod_base = OTHER; note = N1-methylpseudouracil
  modified_base 821: mod_base = OTHER; note = N1-methylpseudouracil
  modified_base 827: mod_base = OTHER; note = N1-methylpseudouracil
  modified_base 829: mod_base = OTHER; note = N1-methylpseudouracil
  modified_base 833: mod_base = OTHER; note = N1-methylpseudouracil
  modified_base 835: mod_base = OTHER; note = N1-methylpseudouracil
  modified_base 841: mod_base = OTHER; note = N1-methylpseudouracil
  modified_base 852: mod_base = OTHER; note = N1-methylpseudouracil
  modified_base 860: mod_base = OTHER; note = N1-methylpseudouracil
  modified_base 872: mod_base = OTHER; note = N1-methylpseudouracil
  modified_base 875: mod_base = OTHER; note = N1-methylpseudouracil
  modified_base 877: mod_base = OTHER; note = N1-methylpseudouracil
  modified_base 886: mod_base = OTHER; note = N1-methylpseudouracil
  modified_base 887: mod_base = OTHER; note = N1-methylpseudouracil
  modified_base 889: mod_base = OTHER; note = N1-methylpseudouracil
  modified_base 907: mod_base = OTHER; note = N1-methylpseudouracil
  modified_base 908: mod_base = OTHER; note = N1-methylpseudouracil
  modified_base 909: mod_base = OTHER; note = N1-methylpseudouracil
  modified_base 912: mod_base = OTHER; note = N1-methylpseudouracil
  modified_base 918: mod_base = OTHER; note = N1-methylpseudouracil
  modified_base 924: mod_base = OTHER; note = N1-methylpseudouracil
  modified_base 931: mod_base = OTHER; note = N1-methylpseudouracil
  modified_base 938: mod_base = OTHER; note = N1-methylpseudouracil
  modified_base 940: mod_base = OTHER; note = N1-methylpseudouracil
  modified_base 941: mod_base = OTHER; note = N1-methylpseudouracil
  modified_base 946: mod_base = OTHER; note = N1-methylpseudouracil
  modified_base 949: mod_base = OTHER; note = N1-methylpseudouracil
  modified_base 950: mod_base = OTHER; note = N1-methylpseudouracil
  modified_base 956: mod_base = OTHER; note = N1-methylpseudouracil
  modified_base 959: mod_base = OTHER; note = N1-methylpseudouracil
  modified_base 962: mod_base = OTHER; note = N1-methylpseudouracil
  modified_base 968: mod_base = OTHER; note = N1-methylpseudouracil
  modified_base 969: mod_base = OTHER; note = N1-methylpseudouracil
  modified_base 981: mod_base = OTHER; note = N1-methylpseudouracil
  modified_base 996: mod_base = OTHER; note = N1-methylpseudouracil
  modified_base 1003: mod_base = OTHER; note = N1-methylpseudouracil
  modified_base 1004: mod_base = OTHER; note = N1-methylpseudouracil
  modified_base 1007: mod_base = OTHER; note = N1-methylpseudouracil
  modified_base 1016: mod_base = OTHER; note = N1-methylpseudouracil
  modified_base 1024: mod_base = OTHER; note = N1-methylpseudouracil
  modified_base 1028: mod_base = OTHER; note = N1-methylpseudouracil
  modified_base 1048: mod_base = OTHER; note = N1-methylpseudouracil
  modified_base 1049: mod_base = OTHER; note = N1-methylpseudouracil
  modified_base 1052: mod_base = OTHER; note = N1-methylpseudouracil
  modified_base 1054: mod_base = OTHER; note = N1-methylpseudouracil
  modified_base 1057: mod_base = OTHER; note = N1-methylpseudouracil
  modified_base 1061: mod_base = OTHER; note = N1-methylpseudouracil
  modified_base 1075: mod_base = OTHER; note = N1-methylpseudouracil
  modified_base 1079: mod_base = OTHER; note = N1-methylpseudouracil
  modified_base 1087: mod_base = OTHER; note = N1-methylpseudouracil
  modified_base 1088: mod_base = OTHER; note = N1-methylpseudouracil
  modified_base 1091: mod_base = OTHER; note = N1-methylpseudouracil
  modified_base 1094: mod_base = OTHER; note = N1-methylpseudouracil
  modified_base 1096: mod_base = OTHER; note = N1-methylpseudouracil
  modified_base 1115: mod_base = OTHER; note = N1-methylpseudouracil
  modified_base 1126: mod_base = OTHER; note = N1-methylpseudouracil
  modified_base 1135: mod_base = OTHER; note = N1-methylpseudouracil
  modified_base 1139: mod_base = OTHER; note = N1-methylpseudouracil
  modified_base 1148: mod_base = OTHER; note = N1-methylpseudouracil
  modified_base 1151: mod_base = OTHER; note = N1-methylpseudouracil
  modified_base 1153: mod_base = OTHER; note = N1-methylpseudouracil
  modified_base 1157: mod_base = OTHER; note = N1-methylpseudouracil
  modified_base 1165: mod_base = OTHER; note = N1-methylpseudouracil
  modified_base 1172: mod_base = OTHER; note = N1-methylpseudouracil
  modified_base 1178: mod_base = OTHER; note = N1-methylpseudouracil
  modified_base 1181: mod_base = OTHER; note = N1-methylpseudouracil
  modified_base 1189: mod_base = OTHER; note = N1-methylpseudouracil
  modified_base 1193: mod_base = OTHER; note = N1-methylpseudouracil
  modified_base 1196: mod_base = OTHER; note = N1-methylpseudouracil
  modified_base 1199: mod_base = OTHER; note = N1-methylpseudouracil
  modified_base 1246: mod_base = OTHER; note = N1-methylpseudouracil
  modified_base 1253: mod_base = OTHER; note = N1-methylpseudouracil
  modified_base 1260: mod_base = OTHER; note = N1-methylpseudouracil
  modified_base 1278: mod_base = OTHER; note = N1-methylpseudouracil
  modified_base 1283: mod_base = OTHER; note = N1-methylpseudouracil
  modified_base 1286: mod_base = OTHER; note = N1-methylpseudouracil
  modified_base 1291: mod_base = OTHER; note = N1-methylpseudouracil
  modified_base 1292: mod_base = OTHER; note = N1-methylpseudouracil
  modified_base 1295: mod_base = OTHER; note = N1-methylpseudouracil
  modified_base 1304: mod_base = OTHER; note = N1-methylpseudouracil
  modified_base 1328: mod_base = OTHER; note = N1-methylpseudouracil
  modified_base 1331: mod_base = OTHER; note = N1-methylpseudouracil
  modified_base 1342: mod_base = OTHER; note = N1-methylpseudouracil
  modified_base 1346: mod_base = OTHER; note = N1-methylpseudouracil
  modified_base 1348: mod_base = OTHER; note = N1-methylpseudouracil
  modified_base 1353: mod_base = OTHER; note = N1-methylpseudouracil
  modified_base 1360: mod_base = OTHER; note = N1-methylpseudouracil
  modified_base 1364: mod_base = OTHER; note = N1-methylpseudouracil
  modified_base 1369: mod_base = OTHER; note = N1-methylpseudouracil
  modified_base 1373: mod_base = OTHER; note = N1-methylpseudouracil
  modified_base 1374: mod_base = OTHER; note = N1-methylpseudouracil
  modified_base 1376: mod_base = OTHER; note = N1-methylpseudouracil
  modified_base 1377: mod_base = OTHER; note = N1-methylpseudouracil
  modified_base 1383: mod_base = OTHER; note = N1-methylpseudouracil
  modified_base 1384: mod_base = OTHER; note = N1-methylpseudouracil
  modified_base 1390: mod_base = OTHER; note = N1-methylpseudouracil
  modified_base 1403: mod_base = OTHER; note = N1-methylpseudouracil
  modified_base 1406: mod_base = OTHER; note = N1-methylpseudouracil
  modified_base 1411: mod_base = OTHER; note = N1-methylpseudouracil
  modified_base 1412: mod_base = OTHER; note = N1-methylpseudouracil
  modified_base 1415: mod_base = OTHER; note = N1-methylpseudouracil
  modified_base 1423: mod_base = OTHER; note = N1-methylpseudouracil
  modified_base 1431: mod_base = OTHER; note = N1-methylpseudouracil
  modified_base 1434: mod_base = OTHER; note = N1-methylpseudouracil
  modified_base 1436: mod_base = OTHER; note = N1-methylpseudouracil
  modified_base 1437: mod_base = OTHER; note = N1-methylpseudouracil
  modified_base 1438: mod_base = OTHER; note = N1-methylpseudouracil
  modified_base 1442: mod_base = OTHER; note = N1-methylpseudouracil
  modified_base 1447: mod_base = OTHER; note = N1-methylpseudouracil
  modified_base 1449: mod_base = OTHER; note = N1-methylpseudouracil
  modified_base 1453: mod_base = OTHER; note = N1-methylpseudouracil
ggaaatcgcaaaatttgctcttcgcgttagatttcttttagttttctcgcaactagcaagctttttgttctcgccatggggtcgtcgaagtcgaagccgaaagatcctagtcagcgcaggaggggaggaggatccgcccacgccatggagaacagctggaccatcagcaaggagtaccacatcgacgaggaggtgggcttcgccctgcccaacccacaggagaacctgcccgacttctacaacgactggatgttcatcgccaagcacctgcccgacctgatcgagagcgggcagctgcgggaacgggtggagaagctgaacatgctgagcatcgaccacctgaccgaccacaagtcccagcggttggctcggctggtgctgggctgcatcaccatggcctacgtgtggggaaaggggcacggtgacgtgcggaaggtgctgccccgcaacatcgccgtgccctactgccagctgagcaagaagctggagctgcctccgatcctggtgtacgccgactgcgtgctggccaactggaagaagaaggaccccaacaagcccctgacctacgagaacatggacgtgctgttctccttccgggacggggactgcagcaaggggttcttcctggtgagcctgctggtggagatcgccgccgcctctgccatcaaggtgatccccaccgtgttcaaggccatgcagatgcaggagagggacaccctgctgaaggccctgctggagatcgccagctgcctggagaaggccctgcaggtgttccaccagatccacgaccacgtgaaccccaaggccttcttcagcgtgctgcgcatctacctgtccggctggaagggcaatccccagctgagcgacggcctggtgtacgagggcttctgggaggaccccaaggaatttgctggcggtagcgctggccagtccagcgtgttccagtgcttcgacgtgctgctgggcattcagcaaaccgctggaggcggacacgctgcccagttcctgcaggacatgcggcggtacatgccaccggcccaccgcaacttcctgtgctccctggagagcaacccctccgtgcgggagttcgtgctgtccaagggcgacgccggactgagggaggcctacgacgcctgcgtgaaggccctggtgtccctgcgcagctaccacctgcagatcgtgaccaagtacatcctgatccccgcaagccagcagcccaaggagaacaagaccagcgaggacccctccaagctggaagctaagggcaccggcggcactgacctgatgaacttcctgaagaccgtgcggagcaccaccgagaagagcctgctgaaggagggctaagtctccgctggagcctcggtggcctagcttcttgccccttgggcctccccccagcccctcctccccttcctgcacccgtacccccgtggtctttgaataaagtctgagtgggcggc

SEQ ID NO: 312 - RNA, 1460 nt, synthetic construct
  source 1..1460: mol_type = other RNA
  modified_base 6: mod_base = OTHER; note = N1-methylpseudouracil
  modified_base 14: mod_base = OTHER; note = N1-methylpseudouracil
  modified_base 15: mod_base = OTHER; note = N1-methylpseudouracil
  modified_base 16: mod_base = OTHER; note = N1-methylpseudouracil
  modified_base 19: mod_base = OTHER; note = N1-methylpseudouracil
  modified_base 21: mod_base = OTHER; note = N1-methylpseudouracil
  modified_base 22: mod_base = OTHER; note = N1-methylpseudouracil
  modified_base 27: mod_base = OTHER; note = N1-methylpseudouracil
  modified_base 28: mod_base = OTHER; note = N1-methylpseudouracil
  modified_base 32: mod_base = OTHER; note = N1-methylpseudouracil
  modified_base 33: mod_base = OTHER; note = N1-methylpseudouracil
  modified_base 34: mod_base = OTHER; note = N1-methylpseudouracil
  modified_base 36: mod_base = OTHER; note = N1-methylpseudouracil
  modified_base 37: mod_base = OTHER; note = N1-methylpseudouracil
  modified_base 38: mod_base = OTHER; note = N1-methylpseudouracil
  modified_base 39: mod_base = OTHER; note = N1-methylpseudouracil
  modified_base 42: mod_base = OTHER; note = N1-methylpseudouracil
  modified_base 43: mod_base = OTHER; note = N1-methylpseudouracil
  modified_base 44: mod_base = OTHER; note = N1-methylpseudouracil
  modified_base 45: mod_base = OTHER; note = N1-methylpseudouracil
  modified_base 47: mod_base = OTHER; note = N1-methylpseudouracil
  modified_base 54: mod_base = OTHER; note = N1-methylpseudouracil
  modified_base 62: mod_base = OTHER; note = N1-methylpseudouracil
  modified_base 63: mod_base = OTHER; note = N1-methylpseudouracil
  modified_base 64: mod_base = OTHER; note = N1-methylpseudouracil
  modified_base 65: mod_base = OTHER; note = N1-methylpseudouracil
  modified_base 66: mod_base = OTHER; note = N1-methylpseudouracil
  modified_base 68: mod_base = OTHER; note = N1-methylpseudouracil
  modified_base 69: mod_base = OTHER; note = N1-methylpseudouracil
  modified_base 71: mod_base = OTHER; note = N1-methylpseudouracil
  modified_base 77: mod_base = OTHER; note = N1-methylpseudouracil
  modified_base 82: mod_base = OTHER; note = N1-methylpseudouracil
  modified_base 85: mod_base = OTHER; note = N1-methylpseudouracil
  modified_base 91: mod_base = OTHER; note = N1-methylpseudouracil
  modified_base 105: mod_base = OTHER; note = N1-methylpseudouracil
  modified_base 108: mod_base = OTHER; note = N1-methylpseudouracil
  modified_base 111: mod_base = OTHER; note = N1-methylpseudouracil
  modified_base 133: mod_base = OTHER; note = N1-methylpseudouracil
  modified_base 146: mod_base = OTHER; note = N1-methylpseudouracil
  modified_base 157: mod_base = OTHER; note = N1-methylpseudouracil
  modified_base 164: mod_base = OTHER; note = N1-methylpseudouracil
  modified_base 175: mod_base = OTHER; note = N1-methylpseudouracil
  modified_base 182: mod_base = OTHER; note = N1-methylpseudouracil
  modified_base 194: mod_base = OTHER; note = N1-methylpseudouracil
  modified_base 199: mod_base = OTHER; note = N1-methylpseudouracil
  modified_base 200: mod_base = OTHER; note = N1-methylpseudouracil
  modified_base 206: mod_base = OTHER; note = N1-methylpseudouracil
  modified_base 227: mod_base = OTHER; note = N1-methylpseudouracil
  modified_base 235: mod_base = OTHER; note = N1-methylpseudouracil
  modified_base 236: mod_base = OTHER; note = N1-methylpseudouracil
  modified_base 238: mod_base = OTHER; note = N1-methylpseudouracil
  modified_base 247: mod_base = OTHER; note = N1-methylpseudouracil
  modified_base 251: mod_base = OTHER; note = N1-methylpseudouracil
  modified_base 253: mod_base = OTHER; note = N1-methylpseudouracil
  modified_base 254: mod_base = OTHER; note = N1-methylpseudouracil
  modified_base 257: mod_base = OTHER; note = N1-methylpseudouracil
  modified_base 269: mod_base = OTHER; note = N1-methylpseudouracil
  modified_base 278: mod_base = OTHER; note = N1-methylpseudouracil
  modified_base 281: mod_base = OTHER; note = N1-methylpseudouracil
  modified_base 296: mod_base = OTHER; note = N1-methylpseudouracil
  modified_base 308: mod_base = OTHER; note = N1-methylpseudouracil
  modified_base 317: mod_base = OTHER; note = N1-methylpseudouracil
  modified_base 323: mod_base = OTHER; note = N1-methylpseudouracil
  modified_base 326: mod_base = OTHER; note = N1-methylpseudouracil
  modified_base 332: mod_base = OTHER; note = N1-methylpseudouracil
  modified_base 341: mod_base = OTHER; note = N1-methylpseudouracil
  modified_base 355: mod_base = OTHER; note = N1-methylpseudouracil
  modified_base 364: mod_base = OTHER; note = N1-methylpseudouracil
  modified_base 365: mod_base = OTHER; note = N1-methylpseudouracil
  modified_base 369: mod_base = OTHER; note = N1-methylpseudouracil
  modified_base 374: mod_base = OTHER; note = N1-methylpseudouracil
  modified_base 377: mod_base = OTHER; note = N1-methylpseudouracil
  modified_base 380: mod_base = OTHER; note = N1-methylpseudouracil
  modified_base 385: mod_base = OTHER; note = N1-methylpseudouracil
  modified_base 389: mod_base = OTHER; note = N1-methylpseudouracil
  modified_base 395: mod_base = OTHER; note = N1-methylpseudouracil
  modified_base 400: mod_base = OTHER; note = N1-methylpseudouracil
  modified_base 404: mod_base = OTHER; note = N1-methylpseudouracil
  modified_base 406: mod_base = OTHER; note = N1-methylpseudouracil
  modified_base 423: mod_base = OTHER; note = N1-methylpseudouracil
  modified_base 428: mod_base = OTHER; note = N1-methylpseudouracil
  modified_base 437: mod_base = OTHER; note = N1-methylpseudouracil
  modified_base 440: mod_base = OTHER; note = N1-methylpseudouracil
  modified_base 452: mod_base = OTHER; note = N1-methylpseudouracil
  modified_base 458: mod_base = OTHER; note = N1-methylpseudouracil
  modified_base 463: mod_base = OTHER; note = N1-methylpseudouracil
  modified_base 466: mod_base = OTHER; note = N1-methylpseudouracil
  modified_base 473: mod_base = OTHER; note = N1-methylpseudouracil
  modified_base 485: mod_base = OTHER; note = N1-methylpseudouracil
  modified_base 491: mod_base = OTHER; note = N1-methylpseudouracil
  modified_base 495: mod_base = OTHER; note = N1-methylpseudouracil
  modified_base 500: mod_base = OTHER; note = N1-methylpseudouracil
  modified_base 503: mod_base = OTHER; note = N1-methylpseudouracil
  modified_base 506: mod_base = OTHER; note = N1-methylpseudouracil
  modified_base 508: mod_base = OTHER; note = N1-methylpseudouracil
  modified_base 517: mod_base = OTHER; note = N1-methylpseudouracil
  modified_base 521: mod_base = OTHER; note = N1-methylpseudouracil
  modified_base 524: mod_base = OTHER; note = N1-methylpseudouracil
  modified_base 532: mod_base = OTHER; note = N1-methylpseudouracil
  modified_base 560: mod_base = OTHER; note = N1-methylpseudouracil
  modified_base 565: mod_base = OTHER; note = N1-methylpseudouracil
  modified_base 575: mod_base = OTHER; note = N1-methylpseudouracil
  modified_base 581: mod_base = OTHER; note = N1-methylpseudouracil
  modified_base 584: mod_base = OTHER; note = N1-methylpseudouracil
  modified_base 586: mod_base = OTHER; note = N1-methylpseudouracil
  modified_base 587: mod_base = OTHER; note = N1-methylpseudouracil
  modified_base 589: mod_base = OTHER; note = N1-methylpseudouracil
  modified_base 592: mod_base = OTHER; note = N1-methylpseudouracil
  modified_base 593: mod_base = OTHER; note = N1-methylpseudouracil
  modified_base 607: mod_base = OTHER; note = N1-methylpseudouracil
  modified_base 619: mod_base = OTHER; note = N1-methylpseudouracil
  modified_base 620: mod_base = OTHER; note = N1-methylpseudouracil
  modified_base 622: mod_base = OTHER; note = N1-methylpseudouracil
  modified_base 623: mod_base = OTHER; note = N1-methylpseudouracil
  modified_base 626: mod_base = OTHER; note = N1-methylpseudouracil
  modified_base 629: mod_base = OTHER; note = N1-methylpseudouracil
  modified_base 635: mod_base = OTHER; note = N1-methylpseudouracil
  modified_base 638: mod_base = OTHER; note = N1-methylpseudouracil
  modified_base 641: mod_base = OTHER; note = N1-methylpseudouracil
  modified_base 647: mod_base = OTHER; note = N1-methylpseudouracil
  modified_base 658: mod_base = OTHER; note = N1-methylpseudouracil
  modified_base 660: mod_base = OTHER; note = N1-methylpseudouracil
  modified_base 665: mod_base = OTHER; note = N1-methylpseudouracil
  modified_base 671: mod_base = OTHER; note = N1-methylpseudouracil
  modified_base 674: mod_base = OTHER; note = N1-methylpseudouracil
  modified_base 683: mod_base = OTHER; note = N1-methylpseudouracil
  modified_base 685: mod_base = OTHER; note = N1-methylpseudouracil
  modified_base 686: mod_base = OTHER; note = N1-methylpseudouracil
  modified_base 695: mod_base = OTHER; note = N1-methylpseudouracil
  modified_base 701: mod_base = OTHER; note = N1-methylpseudouracil
  modified_base 719: mod_base = OTHER; note = N1-methylpseudouracil
  modified_base 722: mod_base = OTHER; note = N1-methylpseudouracil
  modified_base 731: mod_base = OTHER; note = N1-methylpseudouracil
  modified_base 734: mod_base = OTHER; note = N1-methylpseudouracil
  modified_base 740: mod_base = OTHER; note = N1-methylpseudouracil
  modified_base 748: mod_base = OTHER; note = N1-methylpseudouracil
  modified_base 752: mod_base = OTHER; note = N1-methylpseudouracil
  modified_base 764: mod_base = OTHER; note = N1-methylpseudouracil
  modified_base 770: mod_base = OTHER; note = N1-methylpseudouracil
  modified_base 772: mod_base = OTHER; note = N1-methylpseudouracil
  modified_base 773: mod_base = OTHER; note = N1-methylpseudouracil
  modified_base 782: mod_base = OTHER; note = N1-methylpseudouracil
  modified_base 794: mod_base = OTHER; note = N1-methylpseudouracil
  modified_base 808: mod_base = OTHER; note = N1-methylpseudouracil
  modified_base 809: mod_base = OTHER; note = N1-methylpseudouracil
  modified_base 811: mod_base = OTHER; note = N1-methylpseudouracil
  modified_base 812: mod_base = OTHER; note = N1-methylpseudouracil
  modified_base 818: mod_base = OTHER; note = N1-methylpseudouracil
  modified_base 821: mod_base = OTHER; note = N1-methylpseudouracil
  modified_base 827: mod_base = OTHER; note = N1-methylpseudouracil
  modified_base 829: mod_base = OTHER; note = N1-methylpseudouracil
  modified_base 833: mod_base = OTHER; note = N1-methylpseudouracil
  modified_base 835: mod_base = OTHER; note = N1-methylpseudouracil
  modified_base 841: mod_base = OTHER; note = N1-methylpseudouracil
  modified_base 852: mod_base = OTHER; note = N1-methylpseudouracil
  modified_base 860: mod_base = OTHER; note = N1-methylpseudouracil
  modified_base 872: mod_base = OTHER; note = N1-methylpseudouracil
  modified_base 875: mod_base = OTHER; note = N1-methylpseudouracil
  modified_base 877: mod_base = OTHER; note = N1-methylpseudouracil
  modified_base 886: mod_base = OTHER; note = N1-methylpseudouracil
  modified_base 887: mod_base = OTHER; note = N1-methylpseudouracil
  modified_base 889: mod_base = OTHER; note = N1-methylpseudouracil
  modified_base 907: mod_base = OTHER; note = N1-methylpseudouracil
  modified_base 908: mod_base = OTHER; note = N1-methylpseudouracil
  modified_base 909: mod_base = OTHER; note = N1-methylpseudouracil
  modified_base 912: mod_base = OTHER; note = N1-methylpseudouracil
  modified_base 918: mod_base = OTHER; note = N1-methylpseudouracil
  modified_base 924: mod_base = OTHER; note = N1-methylpseudouracil
  modified_base 931: mod_base = OTHER; note = N1-methylpseudouracil
  modified_base 938: mod_base = OTHER; note = N1-methylpseudouracil
  modified_base 940: mod_base = OTHER; note = N1-methylpseudouracil
  modified_base 941: mod_base = OTHER; note = N1-methylpseudouracil
  modified_base 946: mod_base = OTHER; note = N1-methylpseudouracil
  modified_base 949: mod_base = OTHER; note = N1-methylpseudouracil
  modified_base 950: mod_base = OTHER; note = N1-methylpseudouracil
  modified_base 956: mod_base = OTHER; note = N1-methylpseudouracil
  modified_base 959: mod_base = OTHER; note = N1-methylpseudouracil
  modified_base 962: mod_base = OTHER; note = N1-methylpseudouracil
  modified_base 968: mod_base = OTHER; note = N1-methylpseudouracil
  modified_base 969: mod_base = OTHER; note = N1-methylpseudouracil
  modified_base 981: mod_base = OTHER; note = N1-methylpseudouracil
  modified_base 996: mod_base = OTHER; note = N1-methylpseudouracil
  modified_base 1003: mod_base = OTHER; note = N1-methylpseudouracil
  modified_base 1004: mod_base = OTHER; note = N1-methylpseudouracil
  modified_base 1007: mod_base = OTHER; note = N1-methylpseudouracil
  modified_base 1016: mod_base = OTHER; note = N1-methylpseudouracil
  modified_base 1024: mod_base = OTHER; note = N1-methylpseudouracil
  modified_base 1028: mod_base = OTHER; note = N1-methylpseudouracil
  modified_base 1048: mod_base = OTHER; note = N1-methylpseudouracil
  modified_base 1049: mod_base = OTHER; note = N1-methylpseudouracil
  modified_base 1052: mod_base = OTHER; note = N1-methylpseudouracil
  modified_base 1054: mod_base = OTHER; note = N1-methylpseudouracil
  modified_base 1057: mod_base = OTHER; note = N1-methylpseudouracil
  modified_base 1061: mod_base = OTHER; note = N1-methylpseudouracil
  modified_base 1075: mod_base = OTHER; note = N1-methylpseudouracil
  modified_base 1079: mod_base = OTHER; note = N1-methylpseudouracil
  modified_base 1087: mod_base = OTHER; note = N1-methylpseudouracil
  modified_base 1088: mod_base = OTHER; note = N1-methylpseudouracil
  modified_base 1091: mod_base = OTHER; note = N1-methylpseudouracil
  modified_base 1094: mod_base = OTHER; note = N1-methylpseudouracil
  modified_base 1096: mod_base = OTHER; note = N1-methylpseudouracil
  modified_base 1115: mod_base = OTHER; note = N1-methylpseudouracil
  modified_base 1126: mod_base = OTHER; note = N1-methylpseudouracil
  modified_base 1135: mod_base = OTHER; note = N1-methylpseudouracil
  modified_base 1139: mod_base = OTHER; note = N1-methylpseudouracil
  modified_base 1148: mod_base = OTHER; note = N1-methylpseudouracil
  modified_base 1151: mod_base = OTHER; note = N1-methylpseudouracil
  modified_base 1153: mod_base = OTHER; note = N1-methylpseudouracil
  modified_base 1157: mod_base = OTHER; note = N1-methylpseudouracil
  modified_base 1165: mod_base = OTHER; note = N1-methylpseudouracil
  modified_base 1172: mod_base = OTHER; note = N1-methylpseudouracil
  modified_base 1178: mod_base = OTHER; note = N1-methylpseudouracil
  modified_base 1181: mod_base = OTHER; note = N1-methylpseudouracil
  modified_base 1189: mod_base = OTHER; note = N1-methylpseudouracil
  modified_base 1193: mod_base = OTHER; note = N1-methylpseudouracil
  modified_base 1196: mod_base = OTHER; note = N1-methylpseudouracil
  modified_base 1199: mod_base = OTHER; note = N1-methylpseudouracil
  modified_base 1246: mod_base = OTHER; note = N1-methylpseudouracil
  modified_base 1253: mod_base = OTHER; note = N1-methylpseudouracil
  modified_base 1260: mod_base = OTHER; note = N1-methylpseudouracil
  modified_base 1278: mod_base = OTHER; note = N1-methylpseudouracil
  modified_base 1283: mod_base = OTHER; note = N1-methylpseudouracil
  modified_base 1286: mod_base = OTHER; note = N1-methylpseudouracil
  modified_base 1291: mod_base = OTHER; note = N1-methylpseudouracil
  modified_base 1292: mod_base = OTHER; note = N1-methylpseudouracil
  modified_base 1295: mod_base = OTHER; note = N1-methylpseudouracil
  modified_base 1304: mod_base = OTHER; note = N1-methylpseudouracil
  modified_base 1328: mod_base = OTHER; note = N1-methylpseudouracil
  modified_base 1331: mod_base = OTHER; note = N1-methylpseudouracil
  modified_base 1342: mod_base = OTHER; note = N1-methylpseudouracil
  modified_base 1350: mod_base = OTHER; note = N1-methylpseudouracil
  modified_base 1360: mod_base = OTHER; note = N1-methylpseudouracil
  modified_base 1364: mod_base = OTHER; note = N1-methylpseudouracil
  modified_base 1369: mod_base = OTHER; note = N1-methylpseudouracil
  modified_base 1373: mod_base = OTHER; note = N1-methylpseudouracil
  modified_base 1374: mod_base = OTHER; note = N1-methylpseudouracil
  modified_base 1376: mod_base = OTHER; note = N1-methylpseudouracil
  modified_base 1377: mod_base = OTHER; note = N1-methylpseudouracil
  modified_base 1383: mod_base = OTHER; note = N1-methylpseudouracil
  modified_base 1384: mod_base = OTHER; note = N1-methylpseudouracil
  modified_base 1390: mod_base = OTHER; note = N1-methylpseudouracil
  modified_base 1403: mod_base = OTHER; note = N1-methylpseudouracil
  modified_base 1406: mod_base = OTHER; note = N1-methylpseudouracil
  modified_base 1411: mod_base = OTHER; note = N1-methylpseudouracil
  modified_base 1412: mod_base = OTHER; note = N1-methylpseudouracil
  modified_base 1415: mod_base = OTHER; note = N1-methylpseudouracil
  modified_base 1423: mod_base = OTHER; note = N1-methylpseudouracil
  modified_base 1431: mod_base = OTHER; note = N1-methylpseudouracil
  modified_base 1434: mod_base = OTHER; note = N1-methylpseudouracil
  modified_base 1436: mod_base = OTHER; note = N1-methylpseudouracil
  modified_base 1437: mod_base = OTHER; note = N1-methylpseudouracil
  modified_base 1438: mod_base = OTHER; note = N1-methylpseudouracil
  modified_base 1442: mod_base = OTHER; note = N1-methylpseudouracil
  modified_base 1447: mod_base = OTHER; note = N1-methylpseudouracil
  modified_base 1449: mod_base = OTHER; note = N1-methylpseudouracil
  modified_base 1453: mod_base = OTHER; note = N1-methylpseudouracil
ggaaatcgcaaaatttgctcttcgcgttagatttcttttagttttctcgcaactagcaagctttttgttctcgccatggggtcgtcgaagtcgaagccgaaagatcctagtcagcgcaggaggggaggaggatccgcccacgccatggagaacagctggaccatcagcaaggagtaccacatcgacgaggaggtgggcttcgccctgcccaacccacaggagaacctgcccgacttctacaacgactggatgttcatcgccaagcacctgcccgacctgatcgagagcgggcagctgcgggaacgggtggagaagctgaacatgctgagcatcgaccacctgaccgaccacaagtcccagcggttggctcggctggtgctgggctgcatcaccatggcctacgtgtggggaaaggggcacggtgacgtgcggaaggtgctgccccgcaacatcgccgtgccctactgccagctgagcaagaagctggagctgcctccgatcctggtgtacgccgactgcgtgctggccaactggaagaagaaggaccccaacaagcccctgacctacgagaacatggacgtgctgttctccttccgggacggggactgcagcaaggggttcttcctggtgagcctgctggtggagatcgccgccgcctctgccatcaaggtgatccccaccgtgttcaaggccatgcagatgcaggagagggacaccctgctgaaggccctgctggagatcgccagctgcctggagaaggccctgcaggtgttccaccagatccacgaccacgtgaaccccaaggccttcttcagcgtgctgcgcatctacctgtccggctggaagggcaatccccagctgagcgacggcctggtgtacgagggcttctgggaggaccccaaggaatttgctggcggtagcgctggccagtccagcgtgttccagtgcttcgacgtgctgctgggcattcagcaaaccgctggaggcggacacgctgcccagttcctgcaggacatgcggcggtacatgccaccggcccaccgcaacttcctgtgctccctggagagcaacccctccgtgcgggagttcgtgctgtccaagggcgacgccggactgagggaggcctacgacgcctgcgtgaaggccctggtgtccctgcgcagctaccacctgcagatcgtgaccaagtacatcctgatccccgcaagccagcagcccaaggagaacaagaccagcgaggacccctccaagctggaagctaagggcaccggcggcactgacctgatgaacttcctgaagaccgtgcggagcaccaccgagaagagcctgctgaaggagggctaagcccctccgggggcctcggtggcctagcttcttgccccttgggcctccccccagcccctcctccccttcctgcacccgtacccccgtggtctttgaataaagtctgagtgggcggc

SEQ ID NO: 313 - RNA, 1460 nt, synthetic construct; identical to SEQ ID NO: 311
  source 1..1460: mol_type = other RNA
  modified_base 6: mod_base = OTHER; note = N1-methylpseudouracil
  modified_base 14: mod_base = OTHER; note = N1-methylpseudouracil
  modified_base 15: mod_base = OTHER; note = N1-methylpseudouracil
  modified_base 16: mod_base = OTHER; note = N1-methylpseudouracil
  modified_base 19: mod_base = OTHER; note = N1-methylpseudouracil
  modified_base 21: mod_base = OTHER; note = N1-methylpseudouracil
  modified_base 22: mod_base = OTHER; note = N1-methylpseudouracil
  modified_base 27: mod_base = OTHER; note = N1-methylpseudouracil
  modified_base 28: mod_base = OTHER; note = N1-methylpseudouracil
  modified_base 32: mod_base = OTHER; note = N1-methylpseudouracil
  modified_base 33: mod_base = OTHER; note = N1-methylpseudouracil
  modified_base 34: mod_base = OTHER; note = N1-methylpseudouracil
  modified_base 36: mod_base = OTHER; note = N1-methylpseudouracil
  modified_base 37: mod_base = OTHER; note = N1-methylpseudouracil
  modified_base 38: mod_base = OTHER; note = N1-methylpseudouracil
  modified_base 39: mod_base = OTHER; note = N1-methylpseudouracil
  modified_base 42: mod_base = OTHER; note = N1-methylpseudouracil
  modified_base 43: mod_base = OTHER; note = N1-methylpseudouracil
  modified_base 44: mod_base = OTHER; note = N1-methylpseudouracil
  modified_base 45: mod_base = OTHER; note = N1-methylpseudouracil
  modified_base 47: mod_base = OTHER; note = N1-methylpseudouracil
  modified_base 54: mod_base = OTHER; note = N1-methylpseudouracil
  modified_base 62: mod_base = OTHER; note = N1-methylpseudouracil
  modified_base 63: mod_base = OTHER; note = N1-methylpseudouracil
  modified_base 64: mod_base = OTHER; note = N1-methylpseudouracil
  modified_base 65: mod_base = OTHER; note = N1-methylpseudouracil
  modified_base 66: mod_base = OTHER; note = N1-methylpseudouracil
  modified_base 68: mod_base = OTHER; note = N1-methylpseudouracil
  modified_base 69: mod_base = OTHER; note = N1-methylpseudouracil
  modified_base 71: mod_base = OTHER; note = N1-methylpseudouracil
  modified_base 77: mod_base = OTHER; note = N1-methylpseudouracil
  modified_base 82: mod_base = OTHER; note = N1-methylpseudouracil
  modified_base 85: mod_base = OTHER; note = N1-methylpseudouracil
  modified_base 91: mod_base = OTHER; note = N1-methylpseudouracil
  modified_base 105: mod_base = OTHER; note = N1-methylpseudouracil
  modified_base 108: mod_base = OTHER; note = N1-methylpseudouracil
  modified_base 111: mod_base = OTHER; note = N1-methylpseudouracil
  modified_base 133: mod_base = OTHER; note = N1-methylpseudouracil
  modified_base 146: mod_base = OTHER; note = N1-methylpseudouracil
  modified_base 157: mod_base = OTHER; note = N1-methylpseudouracil
  modified_base 164: mod_base = OTHER; note = N1-methylpseudouracil
  modified_base 175: mod_base = OTHER; note = N1-methylpseudouracil
  modified_base 182: mod_base = OTHER; note = N1-methylpseudouracil
  modified_base 194: mod_base = OTHER; note = N1-methylpseudouracil
  modified_base 199: mod_base = OTHER; note = N1-methylpseudouracil
  modified_base 200: mod_base = OTHER; note = N1-methylpseudouracil
  modified_base 206: mod_base = OTHER; note = N1-methylpseudouracil
  modified_base 227: mod_base = OTHER; note = N1-methylpseudouracil
  modified_base 235: mod_base = OTHER; note = N1-methylpseudouracil
  modified_base 236: mod_base = OTHER; note = N1-methylpseudouracil
  modified_base 238: mod_base = OTHER; note = N1-methylpseudouracil
  modified_base 247: mod_base = OTHER; note = N1-methylpseudouracil
  modified_base 251: mod_base = OTHER; note = N1-methylpseudouracil
  modified_base 253: mod_base = OTHER; note = N1-methylpseudouracil
  modified_base 254: mod_base = OTHER; note = N1-methylpseudouracil
  modified_base 257: mod_base = OTHER; note = N1-methylpseudouracil
  modified_base 269: mod_base = OTHER; note = N1-methylpseudouracil
  modified_base 278: mod_base = OTHER; note = N1-methylpseudouracil
  modified_base 281: mod_base = OTHER; note = N1-methylpseudouracil
  modified_base 296: mod_base = OTHER; note = N1-methylpseudouracil
  modified_base 308: mod_base = OTHER; note = N1-methylpseudouracil
  modified_base 317: mod_base = OTHER; note = N1-methylpseudouracil
  modified_base 323: mod_base = OTHER; note = N1-methylpseudouracil
  modified_base 326: mod_base = OTHER; note = N1-methylpseudouracil
  modified_base 332: mod_base = OTHER; note = N1-methylpseudouracil
  modified_base 341: mod_base = OTHER; note = N1-methylpseudouracil
  modified_base 355: mod_base = OTHER; note = N1-methylpseudouracil
  modified_base 364: mod_base = OTHER; note = N1-methylpseudouracil
  modified_base 365: mod_base = OTHER; note = N1-methylpseudouracil
  modified_base 369: mod_base = OTHER; note = N1-methylpseudouracil
  modified_base 374: mod_base = OTHER; note = N1-methylpseudouracil
  modified_base 377: mod_base = OTHER; note = N1-methylpseudouracil
  modified_base 380: mod_base = OTHER; note = N1-methylpseudouracil
  modified_base 385: mod_base = OTHER; note = N1-methylpseudouracil
  modified_base 389: mod_base = OTHER; note = N1-methylpseudouracil
  modified_base 395: mod_base = OTHER; note = N1-methylpseudouracil
  modified_base 400: mod_base = OTHER; note = N1-methylpseudouracil
  modified_base 404: mod_base = OTHER; note = N1-methylpseudouracil
  modified_base 406: mod_base = OTHER; note = N1-methylpseudouracil
  modified_base 423: mod_base = OTHER; note = N1-methylpseudouracil
  modified_base 428: mod_base = OTHER; note = N1-methylpseudouracil
  modified_base 437: mod_base = OTHER; note = N1-methylpseudouracil
  modified_base 440: mod_base = OTHER; note = N1-methylpseudouracil
  modified_base 452: mod_base = OTHER; note = N1-methylpseudouracil
  modified_base 458: mod_base = OTHER; note = N1-methylpseudouracil
  modified_base 463: mod_base = OTHER; note = N1-methylpseudouracil
  modified_base 466: mod_base = OTHER; note = N1-methylpseudouracil
  modified_base 473: mod_base = OTHER; note = N1-methylpseudouracil
  modified_base 485: mod_base = OTHER; note = N1-methylpseudouracil
  modified_base 491: mod_base = OTHER; note = N1-methylpseudouracil
  modified_base 495: mod_base = OTHER; note = N1-methylpseudouracil
  modified_base 500: mod_base = OTHER; note = N1-methylpseudouracil
  modified_base 503: mod_base = OTHER; note = N1-methylpseudouracil
  modified_base 506: mod_base = OTHER; note = N1-methylpseudouracil
  modified_base 508: mod_base = OTHER; note = N1-methylpseudouracil
  modified_base 517: mod_base = OTHER; note = N1-methylpseudouracil
  modified_base 521: mod_base = OTHER; note = N1-methylpseudouracil
  modified_base 524: mod_base = OTHER; note = N1-methylpseudouracil
  modified_base 532: mod_base = OTHER; note = N1-methylpseudouracil
  modified_base 560: mod_base = OTHER; note = N1-methylpseudouracil
  modified_base 565: mod_base = OTHER; note = N1-methylpseudouracil
  modified_base 575: mod_base = OTHER; note = N1-methylpseudouracil
  modified_base 581: mod_base = OTHER; note = N1-methylpseudouracil
  modified_base 584: mod_base = OTHER; note = N1-methylpseudouracil
  modified_base 586: mod_base = OTHER; note = N1-methylpseudouracil
  modified_base 587: mod_base = OTHER; note = N1-methylpseudouracil
  modified_base 589: mod_base = OTHER; note = N1-methylpseudouracil
  modified_base 592: mod_base = OTHER; note = N1-methylpseudouracil
  modified_base 593: mod_base = OTHER; note = N1-methylpseudouracil
  modified_base 607: mod_base = OTHER; note = N1-methylpseudouracil
  modified_base 619: mod_base = OTHER; note = N1-methylpseudouracil
  modified_base 620: mod_base = OTHER; note = N1-methylpseudouracil
  modified_base 622: mod_base = OTHER; note = N1-methylpseudouracil
  modified_base 623: mod_base = OTHER; note = N1-methylpseudouracil
  modified_base 626: mod_base = OTHER; note = N1-methylpseudouracil
  modified_base 629: mod_base = OTHER; note = N1-methylpseudouracil
  modified_base 635: mod_base = OTHER; note = N1-methylpseudouracil
  modified_base 638: mod_base = OTHER; note = N1-methylpseudouracil
  modified_base 641: mod_base = OTHER; note = N1-methylpseudouracil
  modified_base 647: mod_base = OTHER; note = N1-methylpseudouracil
  modified_base 658: mod_base = OTHER; note = N1-methylpseudouracil
  modified_base 660: mod_base = OTHER; note = N1-methylpseudouracil
  modified_base 665: mod_base = OTHER; note = N1-methylpseudouracil
  modified_base 671: mod_base = OTHER; note = N1-methylpseudouracil
  modified_base 674: mod_base = OTHER; note = N1-methylpseudouracil
  modified_base 683: mod_base = OTHER; note = N1-methylpseudouracil
  modified_base 685: mod_base = OTHER; note = N1-methylpseudouracil
  modified_base 686: mod_base = OTHER; note = N1-methylpseudouracil
  modified_base 695: mod_base = OTHER; note = N1-methylpseudouracil
  modified_base 701: mod_base = OTHER; note = N1-methylpseudouracil
  modified_base 719: mod_base = OTHER; note = N1-methylpseudouracil
  modified_base 722: mod_base = OTHER; note = N1-methylpseudouracil
  modified_base 731: mod_base = OTHER; note = N1-methylpseudouracil
  modified_base 734: mod_base = OTHER; note = N1-methylpseudouracil
  modified_base 740: mod_base = OTHER; note = N1-methylpseudouracil
  modified_base 748: mod_base = OTHER; note = N1-methylpseudouracil
  modified_base 752: mod_base = OTHER; note = N1-methylpseudouracil
  modified_base 764: mod_base = OTHER; note = N1-methylpseudouracil
  modified_base 770: mod_base = OTHER; note = N1-methylpseudouracil
  modified_base 772: mod_base = OTHER; note = N1-methylpseudouracil
  modified_base 773: mod_base = OTHER; note = N1-methylpseudouracil
  modified_base 782: mod_base = OTHER; note = N1-methylpseudouracil
  modified_base 794: mod_base = OTHER; note = N1-methylpseudouracil
  modified_base 808: mod_base = OTHER; note = N1-methylpseudouracil
  modified_base 809: mod_base = OTHER; note = N1-methylpseudouracil
  modified_base 811: mod_base = OTHER; note = N1-methylpseudouracil
  modified_base 812: mod_base = OTHER; note = N1-methylpseudouracil
  modified_base 818: mod_base = OTHER; note = N1-methylpseudouracil
  modified_base 821: mod_base = OTHER; note = N1-methylpseudouracil
  modified_base 827: mod_base = OTHER; note = N1-methylpseudouracil
  modified_base 829: mod_base = OTHER; note = N1-methylpseudouracil
  modified_base 833: mod_base = OTHER; note = N1-methylpseudouracil
  modified_base 835: mod_base = OTHER; note = N1-methylpseudouracil
  modified_base 841: mod_base = OTHER; note = N1-methylpseudouracil
  modified_base 852: mod_base = OTHER; note = N1-methylpseudouracil
  modified_base 860: mod_base = OTHER; note = N1-methylpseudouracil
  modified_base 872: mod_base = OTHER; note = N1-methylpseudouracil
  modified_base 875: mod_base = OTHER; note = N1-methylpseudouracil
  modified_base 877: mod_base = OTHER; note = N1-methylpseudouracil
  modified_base 886: mod_base = OTHER; note = N1-methylpseudouracil
  modified_base 887: mod_base = OTHER; note = N1-methylpseudouracil
  modified_base 889: mod_base = OTHER; note = N1-methylpseudouracil
  modified_base 907: mod_base = OTHER; note = N1-methylpseudouracil
  modified_base 908: mod_base = OTHER; note = N1-methylpseudouracil
  modified_base 909: mod_base = OTHER; note = N1-methylpseudouracil
  modified_base 912: mod_base = OTHER; note = N1-methylpseudouracil
  modified_base 918: mod_base = OTHER; note = N1-methylpseudouracil
  modified_base 924: mod_base = OTHER; note = N1-methylpseudouracil
  modified_base 931: mod_base = OTHER; note = N1-methylpseudouracil
  modified_base 938: mod_base = OTHER; note = N1-methylpseudouracil
  modified_base 940: mod_base = OTHER; note = N1-methylpseudouracil
  modified_base 941: mod_base = OTHER; note = N1-methylpseudouracil
  modified_base 946: mod_base = OTHER; note = N1-methylpseudouracil
  modified_base 949: mod_base = OTHER; note = N1-methylpseudouracil
  modified_base 950: mod_base = OTHER; note = N1-methylpseudouracil
  modified_base 956: mod_base = OTHER; note = N1-methylpseudouracil
  modified_base 959: mod_base = OTHER; note = N1-methylpseudouracil
  modified_base 962: mod_base = OTHER; note = N1-methylpseudouracil
  modified_base 968: mod_base = OTHER; note = N1-methylpseudouracil
  modified_base 969: mod_base = OTHER; note = N1-methylpseudouracil
  modified_base 981: mod_base = OTHER; note = N1-methylpseudouracil
  modified_base 996: mod_base = OTHER; note = N1-methylpseudouracil
  modified_base 1003: mod_base = OTHER; note = N1-methylpseudouracil
  modified_base 1004: mod_base = OTHER; note = N1-methylpseudouracil
  modified_base 1007: mod_base = OTHER; note = N1-methylpseudouracil
  modified_base 1016: mod_base = OTHER; note = N1-methylpseudouracil
  modified_base 1024: mod_base = OTHER; note = N1-methylpseudouracil
  modified_base 1028: mod_base = OTHER; note = N1-methylpseudouracil
  modified_base 1048: mod_base = OTHER; note = N1-methylpseudouracil
  modified_base 1049: mod_base = OTHER; note = N1-methylpseudouracil
  modified_base 1052: mod_base = OTHER; note = N1-methylpseudouracil
  modified_base 1054: mod_base = OTHER; note = N1-methylpseudouracil
  modified_base 1057: mod_base = OTHER; note = N1-methylpseudouracil
  modified_base 1061: mod_base = OTHER; note = N1-methylpseudouracil
  modified_base 1075: mod_base = OTHER; note = N1-methylpseudouracil
  modified_base 1079: mod_base = OTHER; note = N1-methylpseudouracil
  modified_base 1087: mod_base = OTHER; note = N1-methylpseudouracil
  modified_base 1088: mod_base = OTHER; note = N1-methylpseudouracil
  modified_base 1091: mod_base = OTHER; note = N1-methylpseudouracil
  modified_base 1094: mod_base = OTHER; note = N1-methylpseudouracil
  modified_base 1096: mod_base = OTHER; note = N1-methylpseudouracil
  modified_base 1115: mod_base = OTHER; note = N1-methylpseudouracil
  modified_base 1126: mod_base = OTHER; note = N1-methylpseudouracil
  modified_base 1135: mod_base = OTHER; note = N1-methylpseudouracil
  modified_base 1139: mod_base = OTHER; note = N1-methylpseudouracil
  modified_base 1148: mod_base = OTHER; note = N1-methylpseudouracil
  modified_base 1151: mod_base = OTHER; note = N1-methylpseudouracil
  modified_base 1153: mod_base = OTHER; note = N1-methylpseudouracil
  modified_base 1157: mod_base = OTHER; note = N1-methylpseudouracil
  modified_base 1165: mod_base = OTHER; note = N1-methylpseudouracil
  modified_base 1172: mod_base = OTHER; note = N1-methylpseudouracil
  modified_base 1178: mod_base = OTHER; note = N1-methylpseudouracil
  modified_base 1181: mod_base = OTHER; note = N1-methylpseudouracil
  modified_base 1189: mod_base = OTHER; note = N1-methylpseudouracil
  modified_base 1193: mod_base = OTHER; note = N1-methylpseudouracil
  modified_base 1196: mod_base = OTHER; note = N1-methylpseudouracil
  modified_base 1199: mod_base = OTHER; note = N1-methylpseudouracil
  modified_base 1246: mod_base = OTHER; note = N1-methylpseudouracil
  modified_base 1253: mod_base = OTHER; note = N1-methylpseudouracil
  modified_base 1260: mod_base = OTHER; note = N1-methylpseudouracil
  modified_base 1278: mod_base = OTHER; note = N1-methylpseudouracil
  modified_base 1283: mod_base = OTHER; note = N1-methylpseudouracil
  modified_base 1286: mod_base = OTHER; note = N1-methylpseudouracil
  modified_base 1291: mod_base = OTHER; note = N1-methylpseudouracil
  modified_base 1292: mod_base = OTHER; note = N1-methylpseudouracil
  modified_base 1295: mod_base = OTHER; note = N1-methylpseudouracil
  modified_base 1304: mod_base = OTHER; note = N1-methylpseudouracil
  modified_base 1328: mod_base = OTHER; note = N1-methylpseudouracil
  modified_base 1331: mod_base = OTHER; note = N1-methylpseudouracil
  modified_base 1342: mod_base = OTHER; note = N1-methylpseudouracil
  modified_base 1346: mod_base = OTHER; note = N1-methylpseudouracil
  modified_base 1348: mod_base = OTHER; note = N1-methylpseudouracil
  modified_base 1353: mod_base = OTHER; note = N1-methylpseudouracil
  modified_base 1360: mod_base = OTHER; note = N1-methylpseudouracil
  modified_base 1364: mod_base = OTHER; note = N1-methylpseudouracil
  modified_base 1369: mod_base = OTHER; note = N1-methylpseudouracil
  modified_base 1373: mod_base = OTHER; note = N1-methylpseudouracil
  modified_base 1374: mod_base = OTHER; note = N1-methylpseudouracil
  modified_base 1376: mod_base = OTHER; note = N1-methylpseudouracil
  modified_base 1377: mod_base = OTHER; note = N1-methylpseudouracil
  modified_base 1383: mod_base = OTHER; note = N1-methylpseudouracil
  modified_base 1384: mod_base = OTHER; note = N1-methylpseudouracil
  modified_base 1390: mod_base = OTHER; note = N1-methylpseudouracil
  modified_base 1403: mod_base = OTHER; note = N1-methylpseudouracil
  modified_base 1406: mod_base = OTHER; note = N1-methylpseudouracil
  modified_base 1411: mod_base = OTHER; note = N1-methylpseudouracil
  modified_base 1412: mod_base = OTHER; note = N1-methylpseudouracil
  modified_base 1415: mod_base = OTHER; note = N1-methylpseudouracil
  modified_base 1423: mod_base = OTHER; note = N1-methylpseudouracil
  modified_base 1431: mod_base = OTHER; note = N1-methylpseudouracil
  modified_base 1434: mod_base = OTHER; note = N1-methylpseudouracil
  modified_base 1436: mod_base = OTHER; note = N1-methylpseudouracil
  modified_base 1437: mod_base = OTHER; note = N1-methylpseudouracil
  modified_base 1438: mod_base = OTHER; note = N1-methylpseudouracil
  modified_base 1442: mod_base = OTHER; note = N1-methylpseudouracil
  modified_base 1447: mod_base = OTHER; note = N1-methylpseudouracil
  modified_base 1449: mod_base = OTHER; note = N1-methylpseudouracil
  modified_base 1453: mod_base = OTHER; note = N1-methylpseudouracil

SEQ ID NO: 314 - RNA, 1460 nt, synthetic construct; identical to SEQ ID NO: 312
  source 1..1460: mol_type = other RNA
  modified_base 6: mod_base = OTHER; note = N1-methylpseudouracil
  modified_base 14: mod_base = OTHER; note = N1-methylpseudouracil
  modified_base 15: mod_base = OTHER; note = N1-methylpseudouracil
  modified_base 16: mod_base = OTHER; note = N1-methylpseudouracil
  modified_base 19: mod_base = OTHER; note = N1-methylpseudouracil
  modified_base 21: mod_base = OTHER; note = N1-methylpseudouracil
  modified_base 22: mod_base = OTHER; note = N1-methylpseudouracil
  modified_base 27: mod_base = OTHER; note = N1-methylpseudouracil
  modified_base 28: mod_base = OTHER; note = N1-methylpseudouracil
  modified_base 32: mod_base = OTHER; note = N1-methylpseudouracil
  modified_base 33: mod_base = OTHER; note = N1-methylpseudouracil
  modified_base 34: mod_base = OTHER; note = N1-methylpseudouracil
  modified_base 36: mod_base = OTHER; note = N1-methylpseudouracil
  modified_base 37: mod_base = OTHER; note = N1-methylpseudouracil
  modified_base 38: mod_base = OTHER; note = N1-methylpseudouracil
  modified_base 39: mod_base = OTHER; note = N1-methylpseudouracil
  modified_base 42: mod_base = OTHER; note = N1-methylpseudouracil
  modified_base 43: mod_base = OTHER; note = N1-methylpseudouracil
  modified_base 44: mod_base = OTHER; note = N1-methylpseudouracil
  modified_base 45: mod_base = OTHER; note = N1-methylpseudouracil
  modified_base 47: mod_base = OTHER; note = N1-methylpseudouracil
  modified_base 54: mod_base = OTHER; note = N1-methylpseudouracil
  modified_base 62: mod_base = OTHER; note = N1-methylpseudouracil
  modified_base 63: mod_base = OTHER; note = N1-methylpseudouracil
  modified_base 64: mod_base = OTHER; note = N1-methylpseudouracil
  modified_base 65: mod_base = OTHER; note = N1-methylpseudouracil
  modified_base 66: mod_base = OTHER; note = N1-methylpseudouracil
  modified_base 68: mod_base = OTHER; note = N1-methylpseudouracil
  modified_base 69: mod_base = OTHER; note = N1-methylpseudouracil
  modified_base 71: mod_base = OTHER; note = N1-methylpseudouracil
  modified_base 77: mod_base = OTHER; note = N1-methylpseudouracil
  modified_base 82: mod_base = OTHER; note = N1-methylpseudouracil
  modified_base 85: mod_base = OTHER; note = N1-methylpseudouracil
  modified_base 91: mod_base = OTHER; note = N1-methylpseudouracil
  modified_base 105: mod_base = OTHER; note = N1-methylpseudouracil
  modified_base 108: mod_base = OTHER; note = N1-methylpseudouracil
  modified_base 111: mod_base = OTHER; note = N1-methylpseudouracil
  modified_base 133: mod_base = OTHER; note = N1-methylpseudouracil
  modified_base 146: mod_base = OTHER; note = N1-methylpseudouracil
  modified_base 157: mod_base = OTHER; note = N1-methylpseudouracil
  modified_base 164: mod_base = OTHER; note = N1-methylpseudouracil
  modified_base 175: mod_base = OTHER; note = N1-methylpseudouracil
  modified_base 182: mod_base = OTHER; note = N1-methylpseudouracil
  modified_base 194: mod_base = OTHER; note = N1-methylpseudouracil
  modified_base 199: mod_base = OTHER; note = N1-methylpseudouracil
  modified_base 200: mod_base = OTHER; note = N1-methylpseudouracil
  modified_base 206: mod_base = OTHER; note = N1-methylpseudouracil
  modified_base 227: mod_base = OTHER; note = N1-methylpseudouracil
  modified_base 235: mod_base = OTHER; note = N1-methylpseudouracil
  modified_base 236: mod_base = OTHER; note = N1-methylpseudouracil
  modified_base 238: mod_base = OTHER; note = N1-methylpseudouracil
  modified_base 247: mod_base = OTHER; note = N1-methylpseudouracil
  modified_base 251: mod_base = OTHER; note = N1-methylpseudouracil
  modified_base 253: mod_base = OTHER; note = N1-methylpseudouracil
  modified_base 254: mod_base = OTHER; note = N1-methylpseudouracil
  modified_base 257: mod_base = OTHER; note = N1-methylpseudouracil
  modified_base 269: mod_base = OTHER; note = N1-methylpseudouracil
  modified_base 278: mod_base = OTHER; note = N1-methylpseudouracil
  modified_base 281: mod_base = OTHER; note = N1-methylpseudouracil
  modified_base 296: mod_base = OTHER; note = N1-methylpseudouracil
  modified_base 308: mod_base = OTHER; note = N1-methylpseudouracil
  modified_base 317: mod_base = OTHER; note = N1-methylpseudouracil
  modified_base 323: mod_base = OTHER; note = N1-methylpseudouracil
  modified_base 326: mod_base = OTHER; note = N1-methylpseudouracil
  modified_base 332: mod_base = OTHER; note = N1-methylpseudouracil
  modified_base 341: mod_base = OTHER; note = N1-methylpseudouracil
  modified_base 355: mod_base = OTHER; note = N1-methylpseudouracil
  modified_base 364: mod_base = OTHER; note = N1-methylpseudouracil
  modified_base 365: mod_base = OTHER; note = N1-methylpseudouracil
  modified_base 369: mod_base = OTHER; note = N1-methylpseudouracil
  modified_base 374: mod_base = OTHER; note = N1-methylpseudouracil
  modified_base 377: mod_base = OTHER; note = N1-methylpseudouracil
  modified_base 380: mod_base = OTHER; note = N1-methylpseudouracil
  modified_base 385: mod_base = OTHER; note = N1-methylpseudouracil
  modified_base 389: mod_base = OTHER; note = N1-methylpseudouracil
  modified_base 395: mod_base = OTHER; note = N1-methylpseudouracil
  modified_base 400: mod_base = OTHER; note = N1-methylpseudouracil
  modified_base 404: mod_base = OTHER; note = N1-methylpseudouracil
  modified_base 406: mod_base = OTHER; note = N1-methylpseudouracil
  modified_base 423: mod_base = OTHER; note = N1-methylpseudouracil
  modified_base 428: mod_base = OTHER; note = N1-methylpseudouracil
  modified_base 437: mod_base = OTHER; note = N1-methylpseudouracil
  modified_base 440: mod_base = OTHER; note = N1-methylpseudouracil
  modified_base 452: mod_base = OTHER; note = N1-methylpseudouracil
  modified_base 458: mod_base = OTHER; note = N1-methylpseudouracil
  modified_base 463: mod_base = OTHER; note = N1-methylpseudouracil
  modified_base 466: mod_base = OTHER; note = N1-methylpseudouracil
  modified_base 473: mod_base = OTHER; note = N1-methylpseudouracil
  modified_base 485: mod_base = OTHER; note = N1-methylpseudouracil
  modified_base 491: mod_base = OTHER; note = N1-methylpseudouracil
  modified_base 495: mod_base = OTHER; note = N1-methylpseudouracil
  modified_base 500: mod_base = OTHER; note = N1-methylpseudouracil
  modified_base 503: mod_base = OTHER; note = N1-methylpseudouracil
  modified_base 506: mod_base = OTHER; note = N1-methylpseudouracil
  modified_base 508: mod_base = OTHER; note = N1-methylpseudouracil
  modified_base 517: mod_base = OTHER; note = N1-methylpseudouracil
  modified_base 521: mod_base = OTHER; note = N1-methylpseudouracil
  modified_base 524: mod_base = OTHER; note = N1-methylpseudouracil
  modified_base 532: mod_base = OTHER; note = N1-methylpseudouracil
  modified_base 560: mod_base = OTHER; note = N1-methylpseudouracil
  modified_base 565: mod_base = OTHER; note = N1-methylpseudouracil
  modified_base 575: mod_base = OTHER; note = N1-methylpseudouracil
  modified_base 581: mod_base = OTHER; note = N1-methylpseudouracil
  modified_base 584: mod_base = OTHER; note = N1-methylpseudouracil
  modified_base 586: mod_base = OTHER; note = N1-methylpseudouracil
  modified_base 587: mod_base = OTHER; note = N1-methylpseudouracil
  modified_base 589: mod_base = OTHER; note = N1-methylpseudouracil
  modified_base 592: mod_base = OTHER; note = N1-methylpseudouracil
  modified_base 593: mod_base = OTHER; note = N1-methylpseudouracil
  modified_base 607: mod_base = OTHER; note = N1-methylpseudouracil
  modified_base 619: mod_base = OTHER; note = N1-methylpseudouracil
  modified_base 620: mod_base = OTHER; note = N1-methylpseudouracil
  modified_base 622: mod_base = OTHER; note = N1-methylpseudouracil
  modified_base 623: mod_base = OTHER; note = N1-methylpseudouracil
  modified_base 626: mod_base = OTHER; note = N1-methylpseudouracil
  modified_base 629: mod_base = OTHER; note = N1-methylpseudouracil
  modified_base 635: mod_base = OTHER; note = N1-methylpseudouracil
  modified_base 638: mod_base = OTHER; note = N1-methylpseudouracil
  modified_base 641: mod_base = OTHER; note = N1-methylpseudouracil
  modified_base 647: mod_base = OTHER; note = N1-methylpseudouracil
  modified_base 658: mod_base = OTHER; note = N1-methylpseudouracil
  modified_base 660: mod_base = OTHER; note = N1-methylpseudouracil
  modified_base 665: mod_base = OTHER; note = N1-methylpseudouracil
  modified_base 671: mod_base = OTHER; note = N1-methylpseudouracil
  modified_base 674: mod_base = OTHER; note = N1-methylpseudouracil
  modified_base 683: mod_base = OTHER; note = N1-methylpseudouracil
  modified_base 685: mod_base = OTHER; note = N1-methylpseudouracil
  modified_base 686: mod_base = OTHER; note = N1-methylpseudouracil
  modified_base 695: mod_base = OTHER; note = N1-methylpseudouracil
  modified_base 701: mod_base = OTHER; note = N1-methylpseudouracil
  modified_base 719: mod_base = OTHER; note = N1-methylpseudouracil
  modified_base 722: mod_base = OTHER; note = N1-methylpseudouracil
  modified_base 731: mod_base = OTHER; note = N1-methylpseudouracil
  modified_base 734: mod_base = OTHER; note = N1-methylpseudouracil
  modified_base 740: mod_base = OTHER; note = N1-methylpseudouracil
  modified_base 748: mod_base = OTHER; note = N1-methylpseudouracil
  modified_base 752: mod_base = OTHER; note = N1-methylpseudouracil
  modified_base 764: mod_base = OTHER; note = N1-methylpseudouracil
  modified_base 770: mod_base = OTHER; note = N1-methylpseudouracil
  modified_base 772: mod_base = OTHER; note = N1-methylpseudouracil
  modified_base 773: mod_base = OTHER; note = N1-methylpseudouracil
  modified_base 782: mod_base = OTHER; note = N1-methylpseudouracil
  modified_base 794: mod_base = OTHER; note = N1-methylpseudouracil
  modified_base 808: mod_base = OTHER; note = N1-methylpseudouracil
  modified_base 809: mod_base = OTHER; note = N1-methylpseudouracil
  modified_base 811: mod_base = OTHER; note = N1-methylpseudouracil
  modified_base 812: mod_base = OTHER; note = N1-methylpseudouracil
  modified_base 818: mod_base = OTHER; note = N1-methylpseudouracil
  modified_base 821: mod_base = OTHER; note = N1-methylpseudouracil
  modified_base 827: mod_base = OTHER; note = N1-methylpseudouracil
  modified_base 829: mod_base = OTHER; note = N1-methylpseudouracil
  modified_base 833: mod_base = OTHER; note = N1-methylpseudouracil
  modified_base 835: mod_base = OTHER; note = N1-methylpseudouracil
  modified_base 841: mod_base = OTHER; note = N1-methylpseudouracil
  modified_base 852: mod_base = OTHER; note = N1-methylpseudouracil
  modified_base 860: mod_base = OTHER; note = N1-methylpseudouracil
  modified_base 872: mod_base = OTHER; note = N1-methylpseudouracil
  modified_base 875: mod_base = OTHER; note = N1-methylpseudouracil
  modified_base 877: mod_base = OTHER; note = N1-methylpseudouracil
  modified_base 886: mod_base = OTHER; note = N1-methylpseudouracil
  modified_base 887: mod_base = OTHER; note = N1-methylpseudouracil
  modified_base 889: mod_base = OTHER; note = N1-methylpseudouracil
  modified_base 907: mod_base = OTHER; note = N1-methylpseudouracil
  modified_base 908: mod_base = OTHER; note = N1-methylpseudouracil
  modified_base 909: mod_base = OTHER; note = N1-methylpseudouracil
  modified_base 912: mod_base = OTHER; note = N1-methylpseudouracil
  modified_base 918: mod_base = OTHER; note = N1-methylpseudouracil
  modified_base 924: mod_base = OTHER; note = N1-methylpseudouracil
  modified_base 931: mod_base = OTHER; note = N1-methylpseudouracil
  modified_base 938: mod_base = OTHER; note = N1-methylpseudouracil
  modified_base 940: mod_base = OTHER; note = N1-methylpseudouracil
  modified_base 941: mod_base = OTHER; note = N1-methylpseudouracil
  modified_base 946: mod_base = OTHER; note = N1-methylpseudouracil
  modified_base 949: mod_base = OTHER; note = N1-methylpseudouracil
  modified_base 950: mod_base = OTHER; note = N1-methylpseudouracil
  modified_base 956: mod_base = OTHER; note = N1-methylpseudouracil
  modified_base 959: mod_base = OTHER; note = N1-methylpseudouracil
  modified_base 962: mod_base = OTHER; note = N1-methylpseudouracil
  modified_base 968: mod_base = OTHER; note = N1-methylpseudouracil
  modified_base 969: mod_base = OTHER; note = N1-methylpseudouracil
  modified_base 981: mod_base = OTHER; note = N1-methylpseudouracil
  modified_base 996: mod_base = OTHER; note = N1-methylpseudouracil
  modified_base 1003: mod_base = OTHER; note = N1-methylpseudouracil
  modified_base 1004: mod_base = OTHER; note = N1-methylpseudouracil
  modified_base 1007: mod_base = OTHER; note = N1-methylpseudouracil
  modified_base 1016: mod_base = OTHER; note = N1-methylpseudouracil
  modified_base 1024: mod_base = OTHER; note = N1-methylpseudouracil
  modified_base 1028: mod_base = OTHER; note = N1-methylpseudouracil
  modified_base 1048: mod_base = OTHER; note = N1-methylpseudouracil
  modified_base 1049: mod_base = OTHER; note = N1-methylpseudouracil
  modified_base 1052: mod_base = OTHER; note = N1-methylpseudouracil
  modified_base 1054: mod_base = OTHER; note = N1-methylpseudouracil
  modified_base 1057: mod_base = OTHER; note = N1-methylpseudouracil
  modified_base 1061: mod_base = OTHER; note = N1-methylpseudouracil
  modified_base 1075: mod_base = OTHER; note = N1-methylpseudouracil
  modified_base 1079: mod_base = OTHER; note = N1-methylpseudouracil
  modified_base 1087: mod_base = OTHER; note = N1-methylpseudouracil
  modified_base 1088: mod_base = OTHER; note = N1-methylpseudouracil
  modified_base 1091: mod_base = OTHER; note = N1-methylpseudouracil
  modified_base 1094: mod_base = OTHER; note = N1-methylpseudouracil
  modified_base 1096: mod_base = OTHER; note = N1-methylpseudouracil
  modified_base 1115: mod_base = OTHER; note = N1-methylpseudouracil
  modified_base 1126: mod_base = OTHER; note = N1-methylpseudouracil
  modified_base 1135: mod_base = OTHER; note = N1-methylpseudouracil
  modified_base 1139: mod_base = OTHER; note = N1-methylpseudouracil
  modified_base 1148: mod_base = OTHER; note = N1-methylpseudouracil
  modified_base 1151: mod_base = OTHER; note = N1-methylpseudouracil
  modified_base 1153: mod_base = OTHER; note = N1-methylpseudouracil
  modified_base 1157: mod_base = OTHER; note = N1-methylpseudouracil
  modified_base 1165: mod_base = OTHER; note = N1-methylpseudouracil
  modified_base 1172: mod_base = OTHER; note = N1-methylpseudouracil
  modified_base 1178: mod_base = OTHER; note = N1-methylpseudouracil
  modified_base 1181: mod_base = OTHER; note = N1-methylpseudouracil
  modified_base 1189: mod_base = OTHER; note = N1-methylpseudouracil
  modified_base 1193: mod_base = OTHER; note = N1-methylpseudouracil
  modified_base 1196: mod_base = OTHER; note = N1-methylpseudouracil
  modified_base 1199: mod_base = OTHER; note = N1-methylpseudouracil
  modified_base 1246: mod_base = OTHER; note = N1-methylpseudouracil
  modified_base 1253: mod_base = OTHER; note = N1-methylpseudouracil
  modified_base 1260: mod_base = OTHER; note = N1-methylpseudouracil
  modified_base 1278: mod_base = OTHER; note = N1-methylpseudouracil
  modified_base 1283: mod_base = OTHER; note = N1-methylpseudouracil
  modified_base 1286: mod_base = OTHER; note = N1-methylpseudouracil
  modified_base 1291: mod_base = OTHER; note = N1-methylpseudouracil
  modified_base 1292: mod_base = OTHER; note = N1-methylpseudouracil
  modified_base 1295: mod_base = OTHER; note = N1-methylpseudouracil
  modified_base 1304: mod_base = OTHER; note = N1-methylpseudouracil
  modified_base 1328: mod_base = OTHER; note = N1-methylpseudouracil
  modified_base 1331: mod_base = OTHER; note = N1-methylpseudouracil
  modified_base 1342: mod_base = OTHER; note = N1-methylpseudouracil
  modified_base 1350: mod_base = OTHER; note = N1-methylpseudouracil
  modified_base 1360: mod_base = OTHER; note = N1-methylpseudouracil
  modified_base 1364: mod_base = OTHER; note = N1-methylpseudouracil
  modified_base 1369: mod_base = OTHER; note = N1-methylpseudouracil
  modified_base 1373: mod_base = OTHER; note = N1-methylpseudouracil
  modified_base 1374: mod_base = OTHER; note = N1-methylpseudouracil
  modified_base 1376: mod_base = OTHER; note = N1-methylpseudouracil
  modified_base 1377: mod_base = OTHER; note = N1-methylpseudouracil
  modified_base 1383: mod_base = OTHER; note = N1-methylpseudouracil
  modified_base 1384: mod_base = OTHER; note = N1-methylpseudouracil
  modified_base 1390: mod_base = OTHER; note = N1-methylpseudouracil
  modified_base 1403: mod_base = OTHER; note = N1-methylpseudouracil
  modified_base 1406: mod_base = OTHER; note = N1-methylpseudouracil
  modified_base 1411: mod_base = OTHER; note = N1-methylpseudouracil
  modified_base 1412: mod_base = OTHER; note = N1-methylpseudouracil
  modified_base 1415: mod_base = OTHER; note = N1-methylpseudouracil
  modified_base 1423: mod_base = OTHER; note = N1-methylpseudouracil
  modified_base 1431: mod_base = OTHER; note = N1-methylpseudouracil
  modified_base 1434: mod_base = OTHER; note = N1-methylpseudouracil
  modified_base 1436: mod_base = OTHER; note = N1-methylpseudouracil
  modified_base 1437: mod_base = OTHER; note = N1-methylpseudouracil
  modified_base 1438: mod_base = OTHER; note = N1-methylpseudouracil
  modified_base 1442: mod_base = OTHER; note = N1-methylpseudouracil
  modified_base 1447: mod_base = OTHER; note = N1-methylpseudouracil
  modified_base 1449: mod_base = OTHER; note = N1-methylpseudouracil
  modified_base 1453: mod_base = OTHER; note = N1-methylpseudouracil

SEQ ID NO: 315 - RNA, 1460 nt, synthetic construct; identical to SEQ ID NO: 311
  source 1..1460: mol_type = other RNA
  modified_base 6: mod_base = OTHER; note = N1-methylpseudouracil
  modified_base 14: mod_base = OTHER; note = N1-methylpseudouracil
  modified_base 15: mod_base = OTHER; note = N1-methylpseudouracil
  modified_base 16: mod_base = OTHER; note = N1-methylpseudouracil
  modified_base 19: mod_base = OTHER; note = N1-methylpseudouracil
  modified_base 21: mod_base = OTHER; note = N1-methylpseudouracil
  modified_base 22: mod_base = OTHER; note = N1-methylpseudouracil
  modified_base 27: mod_base = OTHER; note = N1-methylpseudouracil
  modified_base 28: mod_base = OTHER; note = N1-methylpseudouracil
  modified_base 32: mod_base = OTHER; note = N1-methylpseudouracil
  modified_base 33: mod_base = OTHER; note = N1-methylpseudouracil
  modified_base 34: mod_base = OTHER; note = N1-methylpseudouracil
  modified_base 36: mod_base = OTHER; note = N1-methylpseudouracil
  modified_base 37: mod_base = OTHER; note = N1-methylpseudouracil
  modified_base 38: mod_base = OTHER; note = N1-methylpseudouracil
  modified_base 39: mod_base = OTHER; note = N1-methylpseudouracil
  modified_base 42: mod_base = OTHER; note = N1-methylpseudouracil
  modified_base 43: mod_base = OTHER; note = N1-methylpseudouracil
  modified_base 44: mod_base = OTHER; note = N1-methylpseudouracil
  modified_base 45: mod_base = OTHER; note = N1-methylpseudouracil
  modified_base 47: mod_base = OTHER; note = N1-methylpseudouracil
  modified_base 54: mod_base = OTHER; note = N1-methylpseudouracil
  modified_base 62: mod_base = OTHER; note = N1-methylpseudouracil
  modified_base 63: mod_base = OTHER; note = N1-methylpseudouracil
  modified_base 64: mod_base = OTHER; note = N1-methylpseudouracil
  modified_base 65: mod_base = OTHER; note = N1-methylpseudouracil
  modified_base 66: mod_base = OTHER; note = N1-methylpseudouracil
  modified_base 68: mod_base = OTHER; note = N1-methylpseudouracil
  modified_base 69: mod_base = OTHER; note = N1-methylpseudouracil
  modified_base 71: mod_base = OTHER; note = N1-methylpseudouracil
  modified_base 77: mod_base = OTHER; note = N1-methylpseudouracil
  modified_base 82: mod_base = OTHER; note = N1-methylpseudouracil
  modified_base 85: mod_base = OTHER; note = N1-methylpseudouracil
  modified_base 91: mod_base = OTHER; note = N1-methylpseudouracil
  modified_base 105: mod_base = OTHER; note = N1-methylpseudouracil
  modified_base 108: mod_base = OTHER; note = N1-methylpseudouracil
  modified_base 111: mod_base = OTHER; note = N1-methylpseudouracil
  modified_base 133: mod_base = OTHER; note = N1-methylpseudouracil
  modified_base 146: mod_base = OTHER; note = N1-methylpseudouracil
  modified_base 157: mod_base = OTHER; note = N1-methylpseudouracil
  modified_base 164: mod_base = OTHER; note = N1-methylpseudouracil
  modified_base 175: mod_base = OTHER; note = N1-methylpseudouracil
  modified_base 182: mod_base = OTHER; note = N1-methylpseudouracil
  modified_base 194: mod_base = OTHER; note = N1-methylpseudouracil
  modified_base 199: mod_base = OTHER; note = N1-methylpseudouracil
  modified_base 200: mod_base = OTHER; note = N1-methylpseudouracil
  modified_base 206: mod_base = OTHER; note = N1-methylpseudouracil
  modified_base 227: mod_base = OTHER; note = N1-methylpseudouracil
  modified_base 235: mod_base = OTHER; note = N1-methylpseudouracil
  modified_base 236: mod_base = OTHER; note = N1-methylpseudouracil
  modified_base 238: mod_base = OTHER; note = N1-methylpseudouracil
  modified_base 247: mod_base = OTHER; note = N1-methylpseudouracil
  modified_base 251: mod_base = OTHER; note = N1-methylpseudouracil
  modified_base 253: mod_base = OTHER; note = N1-methylpseudouracil
  modified_base 254: mod_base = OTHER; note = N1-methylpseudouracil
  modified_base 257: mod_base = OTHER; note = N1-methylpseudouracil
  modified_base 269: mod_base = OTHER; note = N1-methylpseudouracil
  modified_base 278: mod_base = OTHER; note = N1-methylpseudouracil
  modified_base 281: mod_base = OTHER; note = N1-methylpseudouracil
  modified_base 296: mod_base = OTHER; note = N1-methylpseudouracil
  modified_base 308: mod_base = OTHER; note = N1-methylpseudouracil
  modified_base 317: mod_base = OTHER; note = N1-methylpseudouracil
  modified_base 323: mod_base = OTHER; note = N1-methylpseudouracil
  modified_base 326: mod_base = OTHER; note = N1-methylpseudouracil
  modified_base 332: mod_base = OTHER; note = N1-methylpseudouracil
  modified_base 341: mod_base = OTHER; note = N1-methylpseudouracil
  modified_base 355: mod_base = OTHER; note = N1-methylpseudouracil
  modified_base 364: mod_base = OTHER; note = N1-methylpseudouracil
  modified_base 365: mod_base = OTHER; note = N1-methylpseudouracil
  modified_base 369: mod_base = OTHER; note = N1-methylpseudouracil
  modified_base 374: mod_base = OTHER; note = N1-methylpseudouracil
  modified_base 377: mod_base = OTHER; note = N1-methylpseudouracil
  modified_base 380: mod_base = OTHER; note = N1-methylpseudouracil
  modified_base 385: mod_base = OTHER; note = N1-methylpseudouracil
  modified_base 389: mod_base = OTHER; note = N1-methylpseudouracil
  modified_base 395: mod_base = OTHER; note = N1-methylpseudouracil
  modified_base 400: mod_base = OTHER; note = N1-methylpseudouracil
  modified_base 404: mod_base = OTHER; note = N1-methylpseudouracil
  modified_base 406: mod_base = OTHER; note = N1-methylpseudouracil
  modified_base 423: mod_base = OTHER; note = N1-methylpseudouracil
  modified_base 428: mod_base = OTHER; note = N1-methylpseudouracil
  modified_base 437: mod_base = OTHER; note = N1-methylpseudouracil
  modified_base 440: mod_base = OTHER; note = N1-methylpseudouracil
  modified_base 452: mod_base = OTHER; note = N1-methylpseudouracil
  modified_base 458: mod_base = OTHER; note = N1-methylpseudouracil
  modified_base 463: mod_base = OTHER; note = N1-methylpseudouracil
  modified_base 466: mod_base = OTHER; note = N1-methylpseudouracil
  modified_base 473: mod_base = OTHER; note = N1-methylpseudouracil
  modified_base 485: mod_base = OTHER; note = N1-methylpseudouracil
  modified_base 491: mod_base = OTHER; note = N1-methylpseudouracil
  modified_base 495: mod_base = OTHER; note = N1-methylpseudouracil
  modified_base 500: mod_base = OTHER; note = N1-methylpseudouracil
  modified_base 503: mod_base = OTHER; note = N1-methylpseudouracil
  modified_base 506: mod_base = OTHER; note = N1-methylpseudouracil
  modified_base 508: mod_base = OTHER; note = N1-methylpseudouracil
  modified_base 517: mod_base = OTHER; note = N1-methylpseudouracil
  modified_base 521: mod_base = OTHER; note = N1-methylpseudouracil
  modified_base 524: mod_base = OTHER; note = N1-methylpseudouracil
  modified_base 532: mod_base = OTHER; note = N1-methylpseudouracil
  modified_base 560: mod_base = OTHER; note = N1-methylpseudouracil
  modified_base 565: mod_base = OTHER; note = N1-methylpseudouracil
  modified_base 575: mod_base = OTHER; note = N1-methylpseudouracil
  modified_base 581: mod_base = OTHER; note = N1-methylpseudouracil
  modified_base 584: mod_base = OTHER; note = N1-methylpseudouracil
  modified_base 586: mod_base = OTHER; note = N1-methylpseudouracil
  modified_base 587: mod_base = OTHER; note = N1-methylpseudouracil
  modified_base 589: mod_base = OTHER; note = N1-methylpseudouracil
  modified_base 592: mod_base = OTHER; note = N1-methylpseudouracil
  modified_base 593: mod_base = OTHER; note = N1-methylpseudouracil
  modified_base 607: mod_base = OTHER; note = N1-methylpseudouracil
  modified_base 619: mod_base = OTHER; note = N1-methylpseudouracil
  modified_base 620: mod_base = OTHER; note = N1-methylpseudouracil
  modified_base 622: mod_base = OTHER; note = N1-methylpseudouracil
  modified_base 623: mod_base = OTHER; note = N1-methylpseudouracil
  modified_base 626: mod_base = OTHER; note = N1-methylpseudouracil
  modified_base 629: mod_base = OTHER; note = N1-methylpseudouracil
  modified_base 635: mod_base = OTHER; note = N1-methylpseudouracil
  modified_base 638: mod_base = OTHER; note = N1-methylpseudouracil
  modified_base 641: mod_base = OTHER; note = N1-methylpseudouracil
  modified_base 647: mod_base = OTHER; note = N1-methylpseudouracil
  modified_base 658: mod_base = OTHER; note = N1-methylpseudouracil
  modified_base 660: mod_base = OTHER; note = N1-methylpseudouracil
  modified_base 665: mod_base = OTHER; note = N1-methylpseudouracil
  modified_base 671: mod_base = OTHER; note = N1-methylpseudouracil
  modified_base 674: mod_base = OTHER; note = N1-methylpseudouracil
  modified_base 683: mod_base = OTHER; note = N1-methylpseudouracil
  modified_base 685: mod_base = OTHER; note = N1-methylpseudouracil
  modified_base 686: mod_base = OTHER; note = N1-methylpseudouracil
  modified_base 695: mod_base = OTHER; note = N1-methylpseudouracil
  modified_base 701: mod_base = OTHER; note = N1-methylpseudouracil
  modified_base 719: mod_base = OTHER; note = N1-methylpseudouracil
  modified_base 722: mod_base = OTHER; note = N1-methylpseudouracil
  modified_base 731: mod_base = OTHER; note = N1-methylpseudouracil
  modified_base 734: mod_base = OTHER; note = N1-methylpseudouracil
  modified_base 740: mod_base = OTHER; note = N1-methylpseudouracil
  modified_base 748: mod_base = OTHER; note = N1-methylpseudouracil
  modified_base 752: mod_base = OTHER; note = N1-methylpseudouracil
  modified_base 764: mod_base = OTHER; note = N1-methylpseudouracil
  modified_base 770: mod_base = OTHER; note = N1-methylpseudouracil
  modified_base 772: mod_base = OTHER; note = N1-methylpseudouracil
  modified_base 773: mod_base = OTHER; note = N1-methylpseudouracil
  modified_base 782: mod_base = OTHER; note = N1-methylpseudouracil
  modified_base 794: mod_base = OTHER; note = N1-methylpseudouracil
  modified_base 808: mod_base = OTHER; note = N1-methylpseudouracil
  modified_base 809: mod_base = OTHER; note = N1-methylpseudouracil
  modified_base 811: mod_base = OTHER; note = N1-methylpseudouracil
  modified_base 812: mod_base = OTHER; note = N1-methylpseudouracil
  modified_base 818: mod_base = OTHER; note = N1-methylpseudouracil
  modified_base 821: mod_base = OTHER; note = N1-methylpseudouracil
  modified_base 827: mod_base = OTHER; note = N1-methylpseudouracil
  modified_base 829: mod_base = OTHER; note = N1-methylpseudouracil
  modified_base 833: mod_base = OTHER; note = N1-methylpseudouracil
  modified_base 835: mod_base = OTHER; note = N1-methylpseudouracil
  modified_base 841: mod_base = OTHER; note = N1-methylpseudouracil
  modified_base 852: mod_base = OTHER; note = N1-methylpseudouracil
  modified_base 860: mod_base = OTHER; note = N1-methylpseudouracil
  modified_base 872: mod_base = OTHER; note = N1-methylpseudouracil
  modified_base 875: mod_base = OTHER; note = N1-methylpseudouracil
  modified_base 877: mod_base = OTHER; note = N1-methylpseudouracil
  modified_base 886: mod_base = OTHER; note = N1-methylpseudouracil
  modified_base 887: mod_base = OTHER; note = N1-methylpseudouracil
  modified_base 889: mod_base = OTHER; note = N1-methylpseudouracil
  modified_base 907: mod_base = OTHER; note = N1-methylpseudouracil
  modified_base 908: mod_base = OTHER; note = N1-methylpseudouracil
  modified_base 909: mod_base = OTHER; note = N1-methylpseudouracil
  modified_base 912: mod_base = OTHER; note = N1-methylpseudouracil
  modified_base 918: mod_base = OTHER; note = N1-methylpseudouracil
  modified_base 924: mod_base = OTHER; note = N1-methylpseudouracil
  modified_base 931: mod_base = OTHER; note = N1-methylpseudouracil
  modified_base 938: mod_base = OTHER; note = N1-methylpseudouracil
  modified_base 940: mod_base = OTHER; note = N1-methylpseudouracil
  modified_base 941: mod_base = OTHER; note = N1-methylpseudouracil
  modified_base 946: mod_base = OTHER; note = N1-methylpseudouracil
  modified_base 949: mod_base = OTHER; note = N1-methylpseudouracil
  modified_base 950: mod_base = OTHER; note = N1-methylpseudouracil
  modified_base 956: mod_base = OTHER; note = N1-methylpseudouracil
  modified_base 959: mod_base = OTHER; note = N1-methylpseudouracil
  modified_base 962: mod_base = OTHER; note = N1-methylpseudouracil
  modified_base 968: mod_base = OTHER; note = N1-methylpseudouracil
  modified_base 969: mod_base = OTHER; note = N1-methylpseudouracil
  modified_base 981: mod_base = OTHER; note = N1-methylpseudouracil
  modified_base 996: mod_base = OTHER; note = N1-methylpseudouracil
  modified_base 1003: mod_base = OTHER; note = N1-methylpseudouracil
  modified_base 1004: mod_base = OTHER; note = N1-methylpseudouracil
  modified_base 1007: mod_base = OTHER; note = N1-methylpseudouracil
  modified_base 1016: mod_base = OTHER; note = N1-methylpseudouracil
  modified_base 1024: mod_base = OTHER; note = N1-methylpseudouracil
  modified_base 1028: mod_base = OTHER; note = N1-methylpseudouracil
  modified_base 1048: mod_base = OTHER; note = N1-methylpseudouracil
  modified_base 1049: mod_base = OTHER; note = N1-methylpseudouracil
  modified_base 1052: mod_base = OTHER; note = N1-methylpseudouracil
  modified_base 1054: mod_base = OTHER; note = N1-methylpseudouracil
  modified_base 1057: mod_base = OTHER; note = N1-methylpseudouracil
  modified_base 1061: mod_base = OTHER; note = N1-methylpseudouracil
  modified_base 1075: mod_base = OTHER; note = N1-methylpseudouracil
  modified_base 1079: mod_base = OTHER; note = N1-methylpseudouracil
  modified_base 1087: mod_base = OTHER; note = N1-methylpseudouracil
  modified_base 1088: mod_base = OTHER; note = N1-methylpseudouracil
  modified_base 1091: mod_base = OTHER; note = N1-methylpseudouracil
  modified_base 1094: mod_base = OTHER; note = N1-methylpseudouracil
  modified_base 1096: mod_base = OTHER; note = N1-methylpseudouracil
  modified_base 1115: mod_base = OTHER; note = N1-methylpseudouracil
  modified_base 1126: mod_base = OTHER; note = N1-methylpseudouracil
  modified_base 1135: mod_base = OTHER; note = N1-methylpseudouracil
  modified_base 1139: mod_base = OTHER; note = N1-methylpseudouracil
  modified_base 1148: mod_base = OTHER; note = N1-methylpseudouracil
  modified_base 1151: mod_base = OTHER; note = N1-methylpseudouracil
  modified_base 1153: mod_base = OTHER; note = N1-methylpseudouracil
  modified_base 1157: mod_base = OTHER; note = N1-methylpseudouracil
  modified_base 1165: mod_base = OTHER; note = N1-methylpseudouracil
  modified_base 1172: mod_base = OTHER; note = N1-methylpseudouracil
  modified_base 1178: mod_base = OTHER; note = N1-methylpseudouracil
  modified_base 1181: mod_base = OTHER; note = N1-methylpseudouracil
  modified_base 1189: mod_base = OTHER; note = N1-methylpseudouracil
  modified_base 1193: mod_base = OTHER; note = N1-methylpseudouracil
  modified_base 1196: mod_base = OTHER; note = N1-methylpseudouracil
  modified_base 1199: mod_base = OTHER; note = N1-methylpseudouracil
  modified_base 1246: mod_base = OTHER; note = N1-methylpseudouracil
  modified_base 1253: mod_base = OTHER; note = N1-methylpseudouracil
  modified_base 1260: mod_base = OTHER; note = N1-methylpseudouracil
  modified_base 1278: mod_base = OTHER; note = N1-methylpseudouracil
  modified_base 1283: mod_base = OTHER; note = N1-methylpseudouracil
  modified_base 1286: mod_base = OTHER; note = N1-methylpseudouracil
  modified_base 1291: mod_base = OTHER; note = N1-methylpseudouracil
  modified_base 1292: mod_base = OTHER; note = N1-methylpseudouracil
  modified_base 1295: mod_base = OTHER; note = N1-methylpseudouracil
  modified_base 1304: mod_base = OTHER; note = N1-methylpseudouracil
  modified_base 1328: mod_base = OTHER; note = N1-methylpseudouracil
  modified_base 1331: mod_base = OTHER; note = N1-methylpseudouracil
  modified_base 1342: mod_base = OTHER; note = N1-methylpseudouracil
  modified_base 1346: mod_base = OTHER; note = N1-methylpseudouracil
  modified_base 1348: mod_base = OTHER; note = N1-methylpseudouracil
  modified_base 1353: mod_base = OTHER; note = N1-methylpseudouracil
  modified_base 1360: mod_base = OTHER; note = N1-methylpseudouracil
  modified_base 1364: mod_base = OTHER; note = N1-methylpseudouracil
  modified_base 1369: mod_base = OTHER; note = N1-methylpseudouracil
  modified_base 1373: mod_base = OTHER; note = N1-methylpseudouracil
  modified_base 1374: mod_base = OTHER; note = N1-methylpseudouracil
  modified_base 1376: mod_base = OTHER; note = N1-methylpseudouracil
  modified_base 1377: mod_base = OTHER; note = N1-methylpseudouracil
  modified_base 1383: mod_base = OTHER; note = N1-methylpseudouracil
  modified_base 1384: mod_base = OTHER; note = N1-methylpseudouracil
  modified_base 1390: mod_base = OTHER; note = N1-methylpseudouracil
  modified_base 1403: mod_base = OTHER; note = N1-methylpseudouracil
  modified_base 1406: mod_base = OTHER; note = N1-methylpseudouracil
  modified_base 1411: mod_base = OTHER; note = N1-methylpseudouracil
  modified_base 1412: mod_base = OTHER; note = N1-methylpseudouracil
  modified_base 1415: mod_base = OTHER; note = N1-methylpseudouracil
  modified_base 1423: mod_base = OTHER; note = N1-methylpseudouracil
  modified_base 1431: mod_base = OTHER; note = N1-methylpseudouracil
  modified_base 1434: mod_base = OTHER; note = N1-methylpseudouracil
  modified_base 1436: mod_base = OTHER; note = N1-methylpseudouracil
  modified_base 1437: mod_base = OTHER; note = N1-methylpseudouracil
  modified_base 1438: mod_base = OTHER; note = N1-methylpseudouracil
  modified_base 1442: mod_base = OTHER; note = N1-methylpseudouracil
  modified_base 1447: mod_base = OTHER; note = N1-methylpseudouracil
  modified_base 1449: mod_base = OTHER; note = N1-methylpseudouracil
  modified_base 1453: mod_base = OTHER; note = N1-methylpseudouracil

SEQ ID NO: 316 - RNA, 1374 nt, synthetic construct
  source 1..1374: mol_type = other RNA
  modified_base 6: mod_base = OTHER; note = N1-methylpseudouracil
  modified_base 24: mod_base = OTHER; note = N1-methylpseudouracil
  modified_base 34: mod_base = OTHER; note = N1-methylpseudouracil
  modified_base 36: mod_base = OTHER; note = N1-methylpseudouracil
  modified_base 48: mod_base = OTHER; note = N1-methylpseudouracil
  modified_base 58: mod_base = OTHER; note = N1-methylpseudouracil
  modified_base 60: mod_base = OTHER; note = N1-methylpseudouracil
  modified_base 68: mod_base = OTHER; note = N1-methylpseudouracil
  modified_base 71: mod_base = OTHER; note = N1-methylpseudouracil
  modified_base 78: mod_base = OTHER; note = N1-methylpseudouracil
  modified_base 82: mod_base = OTHER; note = N1-methylpseudouracil
  modified_base 89: mod_base = OTHER; note = N1-methylpseudouracil
  modified_base 94: mod_base = OTHER; note = N1-methylpseudouracil
  modified_base 96: mod_base = OTHER; note = N1-methylpseudouracil
  modified_base 97: mod_base = OTHER; note = N1-methylpseudouracil
  modified_base 108: mod_base = OTHER; note = N1-methylpseudouracil
  modified_base 113: mod_base = OTHER; note = N1-methylpseudouracil
  modified_base 114: mod_base = OTHER; note = N1-methylpseudouracil
  modified_base 115: mod_base = OTHER; note = N1-methylpseudouracil
  modified_base 118: mod_base = OTHER; note = N1-methylpseudouracil
  modified_base 119: mod_base = OTHER; note = N1-methylpseudouracil
  modified_base 120: mod_base = OTHER; note = N1-methylpseudouracil
  modified_base 127: mod_base = OTHER; note = N1-methylpseudouracil
  modified_base 139: mod_base = OTHER; note = N1-methylpseudouracil
  modified_base 141: mod_base = OTHER; note = N1-methylpseudouracil
  modified_base 148: mod_base = OTHER; note = N1-methylpseudouracil
  modified_base 149: mod_base = OTHER; note = N1-methylpseudouracil
  modified_base 150: mod_base = OTHER; note = N1-methylpseudouracil
  modified_base 152: mod_base = OTHER; note = N1-methylpseudouracil
  modified_base 154: mod_base = OTHER; note = N1-methylpseudouracil
  modified_base 161: mod_base = OTHER; note = N1-methylpseudouracil
  modified_base 165: mod_base = OTHER; note = N1-methylpseudouracil
  modified_base 167: mod_base = OTHER; note = N1-methylpseudouracil
  modified_base 168: mod_base = OTHER; note = N1-methylpseudouracil
  modified_base 171: mod_base = OTHER; note = N1-methylpseudouracil
  modified_base 172: mod_base = OTHER; note = N1-methylpseudouracil
  modified_base 175: mod_base = OTHER; note = N1-methylpseudouracil
  modified_base 181: mod_base = OTHER; note = N1-methylpseudouracil
  modified_base 182: mod_base = OTHER; note = N1-methylpseudouracil
  modified_base 183: mod_base = OTHER; note = N1-methylpseudouracil
  modified_base 190: mod_base = OTHER; note = N1-methylpseudouracil
  modified_base 192: mod_base = OTHER; note = N1-methylpseudouracil
  modified_base 195: mod_base = OTHER; note = N1-methylpseudouracil
  modified_base 200: mod_base = OTHER; note = N1-methylpseudouracil
  modified_base 202: mod_base = OTHER; note = N1-methylpseudouracil
  modified_base 210: mod_base = OTHER; note = N1-methylpseudouracil
  modified_base 211: mod_base = OTHER; note = N1-methylpseudouracil
  modified_base 222: mod_base = OTHER; note = N1-methylpseudouracil
  modified_base 223: mod_base = OTHER; note = N1-methylpseudouracil
  modified_base 230: mod_base = OTHER; note = N1-methylpseudouracil
  modified_base 231: mod_base = OTHER; note = N1-methylpseudouracil
  modified_base 237: mod_base = OTHER; note = N1-methylpseudouracil
  modified_base 240: mod_base = OTHER; note = N1-methylpseudouracil
  modified_base 246: mod_base = OTHER; note = N1-methylpseudouracil
  modified_base 247: mod_base = OTHER; note = N1-methylpseudouracil
  modified_base 250: mod_base = OTHER; note = N1-methylpseudouracil
  modified_base 253: mod_base = OTHER; note = N1-methylpseudouracil
  modified_base 255: mod_base = OTHER; note = N1-methylpseudouracil
  modified_base 269: mod_base = OTHER; note = N1-methylpseudouracil
  modified_base 279: mod_base = OTHER; note = N1-methylpseudouracil
  modified_base 280: mod_base = OTHER; note = N1-methylpseudouracil
  modified_base 286: mod_base = OTHER; note = N1-methylpseudouracil
  modified_base 288: mod_base = OTHER; note = N1-methylpseudouracil
  modified_base 291: mod_base = OTHER; note = N1-methylpseudouracil
  modified_base 292: mod_base = OTHER; note = N1-methylpseudouracil
  modified_base 294: mod_base = OTHER; note = N1-methylpseudouracil
  modified_base 299: mod_base = OTHER; note = N1-methylpseudouracil
  modified_base 303: mod_base = OTHER; note = N1-methylpseudouracil
  modified_base 309: mod_base = OTHER; note = N1-methylpseudouracil
  modified_base 314: mod_base = OTHER; note = N1-methylpseudouracil
  modified_base 316: mod_base = OTHER; note = N1-methylpseudouracil
  modified_base 318: mod_base = OTHER; note = N1-methylpseudouracil
  modified_base 320: mod_base = OTHER; note = N1-methylpseudouracil
  modified_base 331: mod_base = OTHER; note = N1-methylpseudouracil
  modified_base 334: mod_base = OTHER; note = N1-methylpseudouracil
  modified_base 340: mod_base = OTHER; note = N1-methylpseudouracil
  modified_base 342: mod_base = OTHER; note = N1-methylpseudouracil
  modified_base 346: mod_base = OTHER; note = N1-methylpseudouracil
  modified_base 351: mod_base = OTHER; note = N1-methylpseudouracil
  modified_base 353: mod_base = OTHER; note = N1-methylpseudouracil
  modified_base 354: mod_base = OTHER; note = N1-methylpseudouracil
  modified_base 364: mod_base = OTHER; note = N1-methylpseudouracil
  modified_base 366: mod_base = OTHER; note = N1-methylpseudouracil
  modified_base 367: mod_base = OTHER; note = N1-methylpseudouracil
  modified_base 370: mod_base = OTHER; note = N1-methylpseudouracil
  modified_base 372: mod_base = OTHER; note = N1-methylpseudouracil
  modified_base 373: mod_base = OTHER; note = N1-methylpseudouracil
  modified_base 376: mod_base = OTHER; note = N1-methylpseudouracil
  modified_base 377: mod_base = OTHER; note = N1-methylpseudouracil
  modified_base 380: mod_base = OTHER; note = N1-methylpseudouracil
  modified_base 387: mod_base = OTHER; note = N1-methylpseudouracil
  modified_base 389: mod_base = OTHER; note = N1-methylpseudouracil
  modified_base 399: mod_base = OTHER; note = N1-methylpseudouracil
  modified_base 405: mod_base = OTHER; note = N1-methylpseudouracil
  modified_base 409: mod_base = OTHER; note = N1-methylpseudouracil
  modified_base 412: mod_base = OTHER; note = N1-methylpseudouracil
  modified_base 414: mod_base = OTHER; note = N1-methylpseudouracil
  modified_base 415: mod_base = OTHER; note = N1-methylpseudouracil
  modified_base 416: mod_base = OTHER; note = N1-methylpseudouracil
  modified_base 417: mod_base = OTHER; note = N1-methylpseudouracil
  modified_base 420: mod_base = OTHER; note = N1-methylpseudouracil
  modified_base 421: mod_base = OTHER; note = N1-methylpseudouracil
  modified_base 422: mod_base = OTHER; note = N1-methylpseudouracil
  modified_base 424: mod_base = OTHER; note = N1-methylpseudouracil
  modified_base 431: mod_base = OTHER; note = N1-methylpseudouracil
  modified_base 433: mod_base = OTHER; note = N1-methylpseudouracil
  modified_base 435: mod_base = OTHER; note = N1-methylpseudouracil
  modified_base 437: mod_base = OTHER; note = N1-methylpseudouracil
  modified_base 438: mod_base = OTHER; note = N1-methylpseudouracil
  modified_base 445: mod_base = OTHER; note = N1-methylpseudouracil
  modified_base 446: mod_base = OTHER; note = N1-methylpseudouracil
  modified_base 460: mod_base = OTHER; note = N1-methylpseudouracil
  modified_base 463: mod_base = OTHER; note = N1-methylpseudouracil
  modified_base 466: mod_base = OTHER; note = N1-methylpseudouracil
  modified_base 474: mod_base = OTHER; note = N1-methylpseudouracil
  modified_base 478: mod_base = OTHER; note = N1-methylpseudouracil
  modified_base 479: mod_base = OTHER; note = N1-methylpseudouracil
  modified_base 481: mod_base = OTHER; note = N1-methylpseudouracil
  modified_base 489: mod_base = OTHER; note = N1-methylpseudouracil
  modified_base 495: mod_base = OTHER; note = N1-methylpseudouracil
  modified_base 496: mod_base = OTHER; note = N1-methylpseudouracil
  modified_base 497: mod_base = OTHER; note = N1-methylpseudouracil
  modified_base 498: mod_base = OTHER; note = N1-methylpseudouracil
  modified_base 500: mod_base = OTHER; note = N1-methylpseudouracil
  modified_base 501: mod_base = OTHER; note = N1-methylpseudouracil
  modified_base 503: mod_base = OTHER; note = N1-methylpseudouracil
  modified_base 506: mod_base = OTHER; note = N1-methylpseudouracil
  modified_base 507: mod_base = OTHER; note = N1-methylpseudouracil
  modified_base 508: mod_base = OTHER; note = N1-methylpseudouracil
  modified_base 511: mod_base = OTHER; note = N1-methylpseudouracil
  modified_base 514: mod_base = OTHER; note = N1-methylpseudouracil
  modified_base 521: mod_base = OTHER; note = N1-methylpseudouracil
  modified_base 526: mod_base = OTHER; note = N1-methylpseudouracil
  modified_base 533: mod_base = OTHER; note = N1-methylpseudouracil
  modified_base 534: mod_base = OTHER; note = N1-methylpseudouracil
  modified_base 536: mod_base = OTHER; note = N1-methylpseudouracil
  modified_base 537: mod_base = OTHER; note = N1-methylpseudouracil
  modified_base 540: mod_base = OTHER; note = N1-methylpseudouracil
  modified_base 543: mod_base = OTHER; note = N1-methylpseudouracil
  modified_base 545: mod_base = OTHER; note = N1-methylpseudouracil
  modified_base 547: mod_base = OTHER; note = N1-methylpseudouracil
  modified_base 549: mod_base = OTHER; note = N1-methylpseudouracil
  modified_base 551: mod_base = OTHER; note = N1-methylpseudouracil
  modified_base 552: mod_base = OTHER; note = N1-methylpseudouracil
  modified_base 555: mod_base = OTHER; note = N1-methylpseudouracil
  modified_base 561: mod_base = OTHER; note = N1-methylpseudouracil
  modified_base 568: mod_base = OTHER; note = N1-methylpseudouracil
  modified_base 571: mod_base = OTHER; note = N1-methylpseudouracil
  modified_base 572: mod_base = OTHER; note = N1-methylpseudouracil
  modified_base 574: mod_base = OTHER; note = N1-methylpseudouracil
  modified_base 579: mod_base = OTHER; note = N1-methylpseudouracil
  modified_base 585: mod_base = OTHER; note = N1-methylpseudouracil
  modified_base 588: mod_base = OTHER; note = N1-methylpseudouracil
  modified_base 589: mod_base = OTHER; note = N1-methylpseudouracil
  modified_base 592: mod_base = OTHER; note = N1-methylpseudouracil
  modified_base 595: mod_base = OTHER; note = N1-methylpseudouracil
  modified_base 597: mod_base = OTHER; note = N1-methylpseudouracil
  modified_base 599: mod_base = OTHER; note = N1-methylpseudouracil
  modified_base 600: mod_base = OTHER; note = N1-methylpseudouracil
  modified_base 609: mod_base = OTHER; note = N1-methylpseudouracil
  modified_base 615: mod_base = OTHER; note = N1-methylpseudouracil
  modified_base 631: mod_base = OTHER; note = N1-methylpseudouracil
  modified_base 632: mod_base = OTHER; note = N1-methylpseudouracil
  modified_base 633: mod_base = OTHER; note = N1-methylpseudouracil
  modified_base 636: mod_base = OTHER; note = N1-methylpseudouracil
  modified_base 645: mod_base = OTHER; note = N1-methylpseudouracil
  modified_base 648: mod_base = OTHER; note = N1-methylpseudouracil
  modified_base 654: mod_base = OTHER; note = N1-methylpseudouracil
  modified_base 658: mod_base = OTHER; note = N1-methylpseudouracil
  modified_base 659: mod_base = OTHER; note = N1-methylpseudouracil
  modified_base 661: mod_base = OTHER; note = N1-methylpseudouracil
  modified_base 662: mod_base = OTHER; note = N1-methylpseudouracil
  modified_base 665: mod_base = OTHER; note = N1-methylpseudouracil
  modified_base 666: mod_base = OTHER; note = N1-methylpseudouracil
  modified_base 678: mod_base = OTHER; note = N1-methylpseudouracil
  modified_base 679: mod_base = OTHER; note = N1-methylpseudouracil
  modified_base 684: mod_base = OTHER; note = N1-methylpseudouracil
  modified_base 686: mod_base = OTHER; note = N1-methylpseudouracil
  modified_base 687: mod_base = OTHER; note = N1-methylpseudouracil
  modified_base 688: mod_base = OTHER; note = N1-methylpseudouracil
  modified_base 691: mod_base = OTHER; note = N1-methylpseudouracil
  modified_base 696: mod_base = OTHER; note = N1-methylpseudouracil
  modified_base 700: mod_base = OTHER; note = N1-methylpseudouracil
  modified_base 703: mod_base = OTHER; note = N1-methylpseudouracil
  modified_base 706: mod_base = OTHER; note = N1-methylpseudouracil
  modified_base 708: mod_base = OTHER; note = N1-methylpseudouracil
  modified_base 715: mod_base = OTHER; note = N1-methylpseudouracil
  modified_base 722: mod_base = OTHER; note = N1-methylpseudouracil
  modified_base 723: mod_base = OTHER; note = N1-methylpseudouracil
  modified_base 725: mod_base = OTHER; note = N1-methylpseudouracil
  modified_base 726: mod_base = OTHER; note = N1-methylpseudouracil
  modified_base 730: mod_base = OTHER; note = N1-methylpseudouracil
  modified_base 732: mod_base = OTHER; note = N1-methylpseudouracil
  modified_base 733: mod_base = OTHER; note = N1-methylpseudouracil
  modified_base 735: mod_base = OTHER; note = N1-methylpseudouracil
  modified_base 736: mod_base = OTHER; note = N1-methylpseudouracil
  modified_base 741: mod_base = OTHER; note = N1-methylpseudouracil
  modified_base 743: mod_base = OTHER; note = N1-methylpseudouracil
  modified_base 745: mod_base = OTHER; note = N1-methylpseudouracil
  modified_base 746: mod_base = OTHER; note = N1-methylpseudouracil
  modified_base 747: mod_base = OTHER; note = N1-methylpseudouracil
  modified_base 749: mod_base = OTHER; note = N1-methylpseudouracil
  modified_base 751: mod_base = OTHER; note = N1-methylpseudouracil
  modified_base 755: mod_base = OTHER; note = N1-methylpseudouracil
  modified_base 766: mod_base = OTHER; note = N1-methylpseudouracil
  modified_base 774: mod_base = OTHER; note = N1-methylpseudouracil
  modified_base 776: mod_base = OTHER; note = N1-methylpseudouracil
  modified_base 784: mod_base = OTHER; note = N1-methylpseudouracil
  modified_base 786: mod_base = OTHER; note = N1-methylpseudouracil
  modified_base 789: mod_base = OTHER; note = N1-methylpseudouracil
  modified_base 791: mod_base = OTHER; note = N1-methylpseudouracil
  modified_base 793: mod_base = OTHER; note = N1-methylpseudouracil
  modified_base 800: mod_base = OTHER; note = N1-methylpseudouracil
  modified_base 801: mod_base = OTHER; note = N1-methylpseudouracil
  modified_base 803: mod_base = OTHER; note = N1-methylpseudouracil
  modified_base 821: mod_base = OTHER; note = N1-methylpseudouracil
  modified_base 822: mod_base = OTHER; note = N1-methylpseudouracil
  modified_base 823: mod_base = OTHER; note = N1-methylpseudouracil
  modified_base 835: mod_base = OTHER; note = N1-methylpseudouracil
  modified_base 852: mod_base = OTHER; note = N1-methylpseudouracil
  modified_base 854: mod_base = OTHER; note = N1-methylpseudouracil
  modified_base 855: mod_base = OTHER; note = N1-methylpseudouracil
  modified_base 856: mod_base = OTHER; note = N1-methylpseudouracil
  modified_base 860: mod_base = OTHER; note = N1-methylpseudouracil
  modified_base 863: mod_base = OTHER; note = N1-methylpseudouracil
  modified_base 864: mod_base = OTHER; note = N1-methylpseudouracil
  modified_base 865: mod_base = OTHER; note = N1-methylpseudouracil
  modified_base 870: mod_base = OTHER; note = N1-methylpseudouracil
  modified_base 873: mod_base = OTHER; note = N1-methylpseudouracil
  modified_base 876: mod_base = OTHER; note = N1-methylpseudouracil
  modified_base 882: mod_base = OTHER; note = N1-methylpseudouracil
  modified_base 892: mod_base = OTHER; note = N1-methylpseudouracil
  modified_base 895: mod_base = OTHER; note = N1-methylpseudouracil
  modified_base 898: mod_base = OTHER; note = N1-methylpseudouracil
  modified_base 907: mod_base = OTHER; note = N1-methylpseudouracil
  modified_base 910: mod_base = OTHER; note = N1-methylpseudouracil
  modified_base 913: mod_base = OTHER; note = N1-methylpseudouracil
  modified_base 917: mod_base = OTHER; note = N1-methylpseudouracil
  modified_base 918: mod_base = OTHER; note = N1-methylpseudouracil
  modified_base 921: mod_base = OTHER; note = N1-methylpseudouracil
  modified_base 930: mod_base = OTHER; note = N1-methylpseudouracil
  modified_base 938: mod_base = OTHER; note = N1-methylpseudouracil
  modified_base 940: mod_base = OTHER; note = N1-methylpseudouracil
  modified_base 942: mod_base = OTHER; note = N1-methylpseudouracil
  modified_base 952: mod_base = OTHER; note = N1-methylpseudouracil
  modified_base 962: mod_base = OTHER; note = N1-methylpseudouracil
  modified_base 963: mod_base = OTHER; note = N1-methylpseudouracil
  modified_base 966: mod_base = OTHER; note = N1-methylpseudouracil
  modified_base 968: mod_base = OTHER; note = N1-methylpseudouracil
  modified_base 971: mod_base = OTHER; note = N1-methylpseudouracil
  modified_base 974: mod_base = OTHER; note = N1-methylpseudouracil
  modified_base 975: mod_base = OTHER; note = N1-methylpseudouracil
  modified_base 980: mod_base = OTHER; note = N1-methylpseudouracil
  modified_base 985: mod_base = OTHER; note = N1-methylpseudouracil
  modified_base 989: mod_base = OTHER; note = N1-methylpseudouracil
  modified_base 993: mod_base = OTHER; note = N1-methylpseudouracil
  modified_base 997: mod_base = OTHER; note = N1-methylpseudouracil
  modified_base 1001: mod_base = OTHER; note = N1-methylpseudouracil
  modified_base 1002: mod_base = OTHER; note = N1-methylpseudouracil
  modified_base 1003: mod_base = OTHER; note = N1-methylpseudouracil
  modified_base 1005: mod_base = OTHER; note = N1-methylpseudouracil
  modified_base 1008: mod_base = OTHER; note = N1-methylpseudouracil
  modified_base 1009: mod_base = OTHER; note = N1-methylpseudouracil
  modified_base 1010: mod_base = OTHER; note = N1-methylpseudouracil
  modified_base 1012: mod_base = OTHER; note = N1-methylpseudouracil
  modified_base 1018: mod_base = OTHER; note = N1-methylpseudouracil
  modified_base 1021: mod_base = OTHER; note = N1-methylpseudouracil
  modified_base 1024: mod_base = OTHER; note = N1-methylpseudouracil
  modified_base 1029: mod_base = OTHER; note = N1-methylpseudouracil
  modified_base 1039: mod_base = OTHER; note = N1-methylpseudouracil
  modified_base 1040: mod_base = OTHER; note = N1-methylpseudouracil
  modified_base 1042: mod_base = OTHER; note = N1-methylpseudouracil
  modified_base 1049: mod_base = OTHER; note = N1-methylpseudouracil
  modified_base 1051: mod_base = OTHER; note = N1-methylpseudouracil
  modified_base 1053: mod_base = OTHER; note = N1-methylpseudouracil
  modified_base 1060: mod_base = OTHER; note = N1-methylpseudouracil
  modified_base 1062: mod_base = OTHER; note = N1-methylpseudouracil
  modified_base 1065: mod_base = OTHER; note = N1-methylpseudouracil
  modified_base 1067: mod_base = OTHER; note = N1-methylpseudouracil
  modified_base 1071: mod_base = OTHER; note = N1-methylpseudouracil
  modified_base 1079: mod_base = OTHER; note = N1-methylpseudouracil
  modified_base 1084: mod_base = OTHER; note = N1-methylpseudouracil
  modified_base 1086: mod_base = OTHER; note = N1-methylpseudouracil
  modified_base 1092: mod_base = OTHER; note = N1-methylpseudouracil
  modified_base 1095: mod_base = OTHER; note = N1-methylpseudouracil
  modified_base 1099: mod_base = OTHER; note = N1-methylpseudouracil
  modified_base 1103: mod_base = OTHER; note = N1-methylpseudouracil
  modified_base 1107: mod_base = OTHER; note = N1-methylpseudouracil
  modified_base 1110: mod_base = OTHER; note = N1-methylpseudouracil
  modified_base 1113: mod_base = OTHER; note = N1-methylpseudouracil
  modified_base 1114: mod_base = OTHER; note = N1-methylpseudouracil
  modified_base 1117: mod_base = OTHER; note = N1-methylpseudouracil
  modified_base 1132: mod_base = OTHER; note = N1-methylpseudouracil
  modified_base 1141: mod_base = OTHER; note = N1-methylpseudouracil
  modified_base 1148: mod_base = OTHER; note = N1-methylpseudouracil
  modified_base 1150: mod_base = OTHER; note = N1-methylpseudouracil
  modified_base 1159: mod_base = OTHER; note = N1-methylpseudouracil
  modified_base 1160: mod_base = OTHER; note = N1-methylpseudouracil
  modified_base 1166: mod_base = OTHER; note = N1-methylpseudouracil
  modified_base 1167: mod_base = OTHER; note = N1-methylpseudouracil
  modified_base 1183: mod_base = OTHER; note = N1-methylpseudouracil
  modified_base 1192: mod_base = OTHER; note = N1-methylpseudouracil
  modified_base 1195: mod_base = OTHER; note = N1-methylpseudouracil
  modified_base 1196: mod_base = OTHER; note = N1-methylpseudouracil
  modified_base 1197: mod_base = OTHER; note = N1-methylpseudouracil
  modified_base 1200: mod_base = OTHER; note = N1-methylpseudouracil
  modified_base 1204: mod_base = OTHER; note = N1-methylpseudouracil
  modified_base 1205: mod_base = OTHER; note = N1-methylpseudouracil
  modified_base 1206: mod_base = OTHER; note = N1-methylpseudouracil
  modified_base 1209: mod_base = OTHER; note = N1-methylpseudouracil
  modified_base 1216: mod_base = OTHER; note = N1-methylpseudouracil
  modified_base 1218: mod_base = OTHER; note = N1-methylpseudouracil
  modified_base 1225: mod_base = OTHER; note = N1-methylpseudouracil
  modified_base 1231: mod_base = OTHER; note = N1-methylpseudouracil
  modified_base 1238: mod_base = OTHER; note = N1-methylpseudouracil
  modified_base 1242: mod_base = OTHER; note = N1-methylpseudouracil
  modified_base 1243: mod_base = OTHER; note = N1-methylpseudouracil
  modified_base 1244: mod_base = OTHER; note = N1-methylpseudouracil
  modified_base 1245: mod_base = OTHER; note = N1-methylpseudouracil
  modified_base 1255: mod_base = OTHER; note = N1-methylpseudouracil
  modified_base 1256: mod_base = OTHER; note = N1-methylpseudouracil
  modified_base 1259: mod_base = OTHER; note = N1-methylpseudouracil
  modified_base 1262: mod_base = OTHER; note = N1-methylpseudouracil
  modified_base 1267: mod_base = OTHER; note = N1-methylpseudouracil
  modified_base 1274: mod_base = OTHER; note = N1-methylpseudouracil
  modified_base 1278: mod_base = OTHER; note = N1-methylpseudouracil
  modified_base 1284: mod_base = OTHER; note = N1-methylpseudouracil
  modified_base 1287: mod_base = OTHER; note = N1-methylpseudouracil
  modified_base 1288: mod_base = OTHER; note = N1-methylpseudouracil
  modified_base 1290: mod_base = OTHER; note = N1-methylpseudouracil
  modified_base 1291: mod_base = OTHER; note = N1-methylpseudouracil
  modified_base 1297: mod_base = OTHER; note = N1-methylpseudouracil
  modified_base 1298: mod_base = OTHER; note = N1-methylpseudouracil
  modified_base 1304: mod_base = OTHER; note = N1-methylpseudouracil
  modified_base 1317: mod_base = OTHER; note = N1-methylpseudouracil
  modified_base 1320: mod_base = OTHER; note = N1-methylpseudouracil
  modified_base 1325: mod_base = OTHER; note = N1-methylpseudouracil
  modified_base 1326: mod_base = OTHER; note = N1-methylpseudouracil
  modified_base 1329: mod_base = OTHER; note = N1-methylpseudouracil
  modified_base 1337: mod_base = OTHER; note = N1-methylpseudouracil
  modified_base 1345: mod_base = OTHER; note = N1-methylpseudouracil
  modified_base 1348: mod_base = OTHER; note = N1-methylpseudouracil
  modified_base 1350: mod_base = OTHER; note = N1-methylpseudouracil
  modified_base 1351: mod_base = OTHER; note = N1-methylpseudouracil
  modified_base 1352: mod_base = OTHER; note = N1-methylpseudouracil
  modified_base 1356: mod_base = OTHER; note = N1-methylpseudouracil
  modified_base 1361: mod_base = OTHER; note = N1-methylpseudouracil
  modified_base 1363: mod_base = OTHER; note = N1-methylpseudouracil
  modified_base 1367: mod_base = OTHER; note = N1-methylpseudouracil
ggaaataagagagaaaagaagagtaagaagaaatataagagccaccatggcacacgctatggagaactcctggacaatcagtaaagagtaccatattgacgaagaagtgggctttgctttgccaaatccacaggagaatctaccagatttctataacgactggatgttcattgctaaacatttaccagatctcatagagtctggccagcttcgagaaagagttgagaagttaaacatgctcagcattgatcatctcacagaccacaagtcacagcgccttgcacgtctagttctgggatgcatcaccatggcatatgtgtggggcaaaggtcatggagatgtccgtaaggtcttgccaagaaatattgctgttccttactgccaactctccaagaaactggaactgcctcctattttggtttatgcagactgtgtcttggccaattggaagaagaaggatcctaataagcccctgacttatgagaacatggacgttttgttctcatttcgtgatggagactgcagtaaaggattcttcctcgtctctctattggtggaaatagcagctgcttctgcaatcaaagtaattcctactgtattcaaggcaatgcaaatgcaagaacgggacactttgctaaaggcgctgctggagatcgcttcttgcttggagaaagcccttcaagtgtttcatcaaatacatgatcatgtgaaccctaaggcattcttcagtgttcttcgcatatatttgtctggctggaaaggcaatccgcagctatcagacggtctggtgtatgaaggcttctgggaagacccaaaggagtttgcaggaggcagtgcaggccaaagcagcgtctttcagtgctttgacgtcctgctgggcatccagcagactgctggtggaggacatgctgctcagttcctccaggacatgagaagatatatgccaccagctcacaggaacttcctgtgctcattagagtcaaatccctcagtccgtgagtttgtcctttctaagggtgatgctggcctgcgggaagcttatgacgcctgtgtgaaagctctggtgtccctgaggagctaccatctgcaaatcgtgactaagtacatcctgattcctgcaagccagcagcctaaggagaataagacctctgaagacccttcaaagttggaggcaaagggcactggaggcactgatttaatgaatttcctgaagactgtaagaagtacaactgagaaatcccttttgaaggaaggttgataataggctggagcctcggtggccatgcttcttgccccttgggcctccccccagcccctcctccccttcctgcacccgtacccccgtggtctttgaataaagtctgagtgggcggc

SEQ ID NO: 317 - RNA, 1477 nt, synthetic construct
  source 1..1477: mol_type = other RNA
  modified_base 6: mod_base = OTHER; note = N1-methylpseudouracil
  modified_base 24: mod_base = OTHER; note = N1-methylpseudouracil
  modified_base 34: mod_base = OTHER; note = N1-methylpseudouracil
  modified_base 36: mod_base = OTHER; note = N1-methylpseudouracil
  modified_base 58: mod_base = OTHER; note = N1-methylpseudouracil
  modified_base 70: mod_base = OTHER; note = N1-methylpseudouracil
  modified_base 81: mod_base = OTHER; note = N1-methylpseudouracil
  modified_base 88: mod_base = OTHER; note = N1-methylpseudouracil
  modified_base 99: mod_base = OTHER; note = N1-methylpseudouracil
  modified_base 106: mod_base = OTHER; note = N1-methylpseudouracil
  modified_base 118: mod_base = OTHER; note = N1-methylpseudouracil
  modified_base 123: mod_base = OTHER; note = N1-methylpseudouracil
  modified_base 124: mod_base = OTHER; note = N1-methylpseudouracil
  modified_base 130: mod_base = OTHER; note = N1-methylpseudouracil
  modified_base 134: mod_base = OTHER; note = N1-methylpseudouracil
  modified_base 140: mod_base = OTHER; note = N1-methylpseudouracil
  modified_base 151: mod_base = OTHER; note = N1-methylpseudouracil
  modified_base 155: mod_base = OTHER; note = N1-methylpseudouracil
  modified_base 159: mod_base = OTHER; note = N1-methylpseudouracil
  modified_base 160: mod_base = OTHER; note = N1-methylpseudouracil
  modified_base 162: mod_base = OTHER; note = N1-methylpseudouracil
  modified_base 171: mod_base = OTHER; note = N1-methylpseudouracil
  modified_base 175: mod_base = OTHER; note = N1-methylpseudouracil
  modified_base 177: mod_base = OTHER; note = N1-methylpseudouracil
  modified_base 178: mod_base = OTHER; note = N1-methylpseudouracil
  modified_base 181: mod_base = OTHER; note = N1-methylpseudouracil
  modified_base 191: mod_base = OTHER; note = N1-methylpseudouracil
  modified_base 193: mod_base = OTHER; note = N1-methylpseudouracil
  modified_base 202: mod_base = OTHER; note = N1-methylpseudouracil
  modified_base 205: mod_base = OTHER; note = N1-methylpseudouracil
  modified_base 220: mod_base = OTHER; note = N1-methylpseudouracil
  modified_base 232: mod_base = OTHER; note = N1-methylpseudouracil
  modified_base 241: mod_base = OTHER; note = N1-methylpseudouracil
  modified_base 247: mod_base = OTHER; note = N1-methylpseudouracil
  modified_base 250: mod_base = OTHER; note = N1-methylpseudouracil
  modified_base 256: mod_base = OTHER; note = N1-methylpseudouracil
  modified_base 265: mod_base = OTHER; note = N1-methylpseudouracil
  modified_base 289: mod_base = OTHER; note = N1-methylpseudouracil
  modified_base 298: mod_base = OTHER; note = N1-methylpseudouracil
  modified_base 301: mod_base = OTHER; note = N1-methylpseudouracil
  modified_base 304: mod_base = OTHER; note = N1-methylpseudouracil
  modified_base 309: mod_base = OTHER; note = N1-methylpseudouracil
  modified_base 313: mod_base = OTHER; note = N1-methylpseudouracil
  modified_base 319: mod_base = OTHER; note = N1-methylpseudouracil
  modified_base 324: mod_base = OTHER; note = N1-methylpseudouracil
  modified_base 328: mod_base = OTHER; note = N1-methylpseudouracil
  modified_base 330: mod_base = OTHER; note = N1-methylpseudouracil
  modified_base 352: mod_base = OTHER; note = N1-methylpseudouracil
  modified_base 361: mod_base = OTHER; note = N1-methylpseudouracil
  modified_base 364: mod_base = OTHER; note = N1-methylpseudouracil
  modified_base 368: mod_base = OTHER; note = N1-methylpseudouracil
  modified_base 376: mod_base = OTHER; note = N1-methylpseudouracil
  modified_base 382: mod_base = OTHER; note = N1-methylpseudouracil
  modified_base 386: mod_base = OTHER; note = N1-methylpseudouracil
  modified_base 387: mod_base = OTHER; note = N1-methylpseudouracil
  modified_base 390: mod_base = OTHER; note = N1-methylpseudouracil
  modified_base 397: mod_base = OTHER; note = N1-methylpseudouracil
  modified_base 409: mod_base = OTHER; note = N1-methylpseudouracil
  modified_base 415: mod_base = OTHER; note = N1-methylpseudouracil
  modified_base 419: mod_base = OTHER; note = N1-methylpseudouracil
  modified_base 422: mod_base = OTHER; note = N1-methylpseudouracil
  modified_base 424: mod_base = OTHER; note = N1-methylpseudouracil
  modified_base 427: mod_base = OTHER; note = N1-methylpseudouracil
  modified_base 430: mod_base = OTHER; note = N1-methylpseudouracil
  modified_base 432: mod_base = OTHER; note = N1-methylpseudouracil
  modified_base 441: mod_base = OTHER; note = N1-methylpseudouracil
  modified_base 445: mod_base = OTHER; note = N1-methylpseudouracil
  modified_base 448: mod_base = OTHER; note = N1-methylpseudouracil
  modified_base 456: mod_base = OTHER; note = N1-methylpseudouracil
  modified_base 473: mod_base = OTHER; note = N1-methylpseudouracil
  modified_base 482: mod_base = OTHER; note = N1-methylpseudouracil
  modified_base 484: mod_base = OTHER; note = N1-methylpseudouracil
  modified_base 489: mod_base = OTHER; note = N1-methylpseudouracil
  modified_base 499: mod_base = OTHER; note = N1-methylpseudouracil
  modified_base 505: mod_base = OTHER; note = N1-methylpseudouracil
  modified_base 508: mod_base = OTHER; note = N1-methylpseudouracil
  modified_base 510: mod_base = OTHER; note = N1-methylpseudouracil
  modified_base 511: mod_base = OTHER; note = N1-methylpseudouracil
  modified_base 516: mod_base = OTHER; note = N1-methylpseudouracil
  modified_base 517: mod_base = OTHER; note = N1-methylpseudouracil
  modified_base 531: mod_base = OTHER; note = N1-methylpseudouracil
  modified_base 543: mod_base = OTHER; note = N1-methylpseudouracil
  modified_base 544: mod_base = OTHER; note = N1-methylpseudouracil
  modified_base 546: mod_base = OTHER; note = N1-methylpseudouracil
  modified_base 547: mod_base = OTHER; note = N1-methylpseudouracil
  modified_base 550: mod_base = OTHER; note = N1-methylpseudouracil
  modified_base 553: mod_base = OTHER; note = N1-methylpseudouracil
  modified_base 559: mod_base = OTHER; note = N1-methylpseudouracil
  modified_base 562: mod_base = OTHER; note = N1-methylpseudouracil
  modified_base 565: mod_base = OTHER; note = N1-methylpseudouracil
  modified_base 571: mod_base = OTHER; note = N1-methylpseudouracil
  modified_base 589: mod_base = OTHER; note = N1-methylpseudouracil
  modified_base 595: mod_base = OTHER; note = N1-methylpseudouracil
  modified_base 598: mod_base = OTHER; note = N1-methylpseudouracil
  modified_base 602: mod_base = OTHER; note = N1-methylpseudouracil
  modified_base 607: mod_base = OTHER; note = N1-methylpseudouracil
  modified_base 609: mod_base = OTHER; note = N1-methylpseudouracil
  modified_base 610: mod_base = OTHER; note = N1-methylpseudouracil
  modified_base 619: mod_base = OTHER; note = N1-methylpseudouracil
  modified_base 625: mod_base = OTHER; note = N1-methylpseudouracil
  modified_base 643: mod_base = OTHER; note = N1-methylpseudouracil
  modified_base 646: mod_base = OTHER; note = N1-methylpseudouracil
  modified_base 655: mod_base = OTHER; note = N1-methylpseudouracil
  modified_base 657: mod_base = OTHER; note = N1-methylpseudouracil
  modified_base 658: mod_base = OTHER; note = N1-methylpseudouracil
  modified_base 664: mod_base = OTHER; note = N1-methylpseudouracil
  modified_base 672: mod_base = OTHER; note = N1-methylpseudouracil
  modified_base 676: mod_base = OTHER; note = N1-methylpseudouracil
  modified_base 688: mod_base = OTHER; note = N1-methylpseudouracil
  modified_base 694: mod_base = OTHER; note = N1-methylpseudouracil
  modified_base 696: mod_base = OTHER; note = N1-methylpseudouracil
  modified_base 697: mod_base = OTHER; note = N1-methylpseudouracil
  modified_base 706: mod_base = OTHER; note = N1-methylpseudouracil
  modified_base 718: mod_base = OTHER; note = N1-methylpseudouracil
  modified_base 725: mod_base = OTHER; note = N1-methylpseudouracil
  modified_base 732: mod_base = OTHER; note = N1-methylpseudouracil
  modified_base 733: mod_base = OTHER; note = N1-methylpseudouracil
  modified_base 735: mod_base = OTHER; note = N1-methylpseudouracil
  modified_base 736: mod_base = OTHER; note = N1-methylpseudouracil
  modified_base 742: mod_base = OTHER; note = N1-methylpseudouracil
  modified_base 745: mod_base = OTHER; note = N1-methylpseudouracil
  modified_base 751: mod_base = OTHER; note = N1-methylpseudouracil
  modified_base 753: mod_base = OTHER; note = N1-methylpseudouracil
  modified_base 757: mod_base = OTHER; note = N1-methylpseudouracil
  modified_base 765: mod_base = OTHER; note = N1-methylpseudouracil
  modified_base 779: mod_base = OTHER; note = N1-methylpseudouracil
  modified_base 784: mod_base = OTHER; note = N1-methylpseudouracil
  modified_base 796: mod_base = OTHER; note = N1-methylpseudouracil
  modified_base 799: mod_base = OTHER; note = N1-methylpseudouracil
  modified_base 801: mod_base = OTHER; note = N1-methylpseudouracil
  modified_base 810: mod_base = OTHER; note = N1-methylpseudouracil
  modified_base 811: mod_base = OTHER; note = N1-methylpseudouracil
  modified_base 813: mod_base = OTHER; note = N1-methylpseudouracil
  modified_base 824: mod_base = OTHER; note = N1-methylpseudouracil
  modified_base 831: mod_base = OTHER; note = N1-methylpseudouracil
  modified_base 832: mod_base = OTHER; note = N1-methylpseudouracil
  modified_base 836: mod_base = OTHER; note = N1-methylpseudouracil
  modified_base 843: mod_base = OTHER; note = N1-methylpseudouracil
  modified_base 862: mod_base = OTHER; note = N1-methylpseudouracil
  modified_base 864: mod_base = OTHER; note = N1-methylpseudouracil
  modified_base 865: mod_base = OTHER; note = N1-methylpseudouracil
  modified_base 870: mod_base = OTHER; note = N1-methylpseudouracil
  modified_base 873: mod_base = OTHER; note = N1-methylpseudouracil
  modified_base 874: mod_base = OTHER; note = N1-methylpseudouracil
  modified_base 880: mod_base = OTHER; note = N1-methylpseudouracil
  modified_base 883: mod_base = OTHER; note = N1-methylpseudouracil
  modified_base 886: mod_base = OTHER; note = N1-methylpseudouracil
  modified_base 892: mod_base = OTHER; note = N1-methylpseudouracil
  modified_base 905: mod_base = OTHER; note = N1-methylpseudouracil
  modified_base 908: mod_base = OTHER; note = N1-methylpseudouracil
  modified_base 923: mod_base = OTHER; note = N1-methylpseudouracil
  modified_base 927: mod_base = OTHER; note = N1-methylpseudouracil
  modified_base 928: mod_base = OTHER; note = N1-methylpseudouracil
  modified_base 931: mod_base = OTHER; note = N1-methylpseudouracil
  modified_base 940: mod_base = OTHER; note = N1-methylpseudouracil
  modified_base 948: mod_base = OTHER; note = N1-methylpseudouracil
  modified_base 952: mod_base = OTHER; note = N1-methylpseudouracil
  modified_base 956: mod_base = OTHER; note = N1-methylpseudouracil
  modified_base 959: mod_base = OTHER; note = N1-methylpseudouracil
  modified_base 972: mod_base = OTHER; note = N1-methylpseudouracil
  modified_base 973: mod_base = OTHER; note = N1-methylpseudouracil
  modified_base 976: mod_base = OTHER; note = N1-methylpseudouracil
  modified_base 978: mod_base = OTHER; note = N1-methylpseudouracil
  modified_base 985: mod_base = OTHER; note = N1-methylpseudouracil
  modified_base 998: mod_base = OTHER; note = N1-methylpseudouracil
  modified_base 1003: mod_base = OTHER; note = N1-methylpseudouracil
  modified_base 1011: mod_base = OTHER; note = N1-methylpseudouracil
  modified_base 1012: mod_base = OTHER; note = N1-methylpseudouracil
  modified_base 1015: mod_base = OTHER; note = N1-methylpseudouracil
  modified_base 1018: mod_base = OTHER; note = N1-methylpseudouracil
  modified_base 1039: mod_base = OTHER; note = N1-methylpseudouracil
  modified_base 1050: mod_base = OTHER; note = N1-methylpseudouracil
  modified_base 1059: mod_base = OTHER; note = N1-methylpseudouracil
  modified_base 1063: mod_base = OTHER; note = N1-methylpseudouracil
  modified_base 1064: mod_base = OTHER; note = N1-methylpseudouracil
  modified_base 1070: mod_base = OTHER; note = N1-methylpseudouracil
  modified_base 1071: mod_base = OTHER; note = N1-methylpseudouracil
  modified_base 1072: mod_base = OTHER; note = N1-methylpseudouracil
  modified_base 1075: mod_base = OTHER; note = N1-methylpseudouracil
  modified_base 1077: mod_base = OTHER; note = N1-methylpseudouracil
  modified_base 1081: mod_base = OTHER; note = N1-methylpseudouracil
  modified_base 1089: mod_base = OTHER; note = N1-methylpseudouracil
  modified_base 1096: mod_base = OTHER; note = N1-methylpseudouracil
  modified_base 1102: mod_base = OTHER; note = N1-methylpseudouracil
  modified_base 1105: mod_base = OTHER; note = N1-methylpseudouracil
  modified_base 1113: mod_base = OTHER; note = N1-methylpseudouracil
  modified_base 1117: mod_base = OTHER; note = N1-methylpseudouracil
  modified_base 1120: mod_base = OTHER; note = N1-methylpseudouracil
  modified_base 1123: mod_base = OTHER; note = N1-methylpseudouracil
  modified_base 1127: mod_base = OTHER; note = N1-methylpseudouracil
  modified_base 1142: mod_base = OTHER; note = N1-methylpseudouracil
  modified_base 1169: mod_base = OTHER; note = N1-methylpseudouracil
  modified_base 1177: mod_base = OTHER; note = N1-methylpseudouracil
  modified_base 1207: mod_base = OTHER; note = N1-methylpseudouracil
  modified_base 1210: mod_base = OTHER; note = N1-methylpseudouracil
  modified_base 1215: mod_base = OTHER; note = N1-methylpseudouracil
  modified_base 1216: mod_base = OTHER; note = N1-methylpseudouracil
  modified_base 1219: mod_base = OTHER; note = N1-methylpseudouracil
  modified_base 1228: mod_base = OTHER; note = N1-methylpseudouracil
  modified_base 1250: mod_base = OTHER; note = N1-methylpseudouracil
  modified_base 1252: mod_base = OTHER; note = N1-methylpseudouracil
  modified_base 1255: mod_base = OTHER; note = N1-methylpseudouracil
  modified_base 1268: mod_base = OTHER; note = N1-methylpseudouracil
  modified_base 1278: mod_base = OTHER; note = N1-methylpseudouracil
  modified_base 1280: mod_base = OTHER; note = N1-methylpseudouracil
  modified_base 1283: mod_base = OTHER; note = N1-methylpseudouracil
  modified_base 1296: mod_base = OTHER; note = N1-methylpseudouracil
  modified_base 1303: mod_base = OTHER; note = N1-methylpseudouracil
  modified_base 1312: mod_base = OTHER; note = N1-methylpseudouracil
  modified_base 1314: mod_base = OTHER; note = N1-methylpseudouracil
  modified_base 1334: mod_base = OTHER; note = N1-methylpseudouracil
  modified_base 1338: mod_base = OTHER; note = N1-methylpseudouracil
  modified_base 1342: mod_base = OTHER; note = N1-methylpseudouracil
  modified_base 1348: mod_base = OTHER; note = N1-methylpseudouracil
  modified_base 1356: mod_base = OTHER; note = N1-methylpseudouracil
  modified_base 1359: mod_base = OTHER; note = N1-methylpseudouracil
  modified_base 1362: mod_base = OTHER; note = N1-methylpseudouracil
  modified_base 1365: mod_base = OTHER; note = N1-methylpseudouracil
  modified_base 1370: mod_base = OTHER; note = N1-methylpseudouracil
  modified_base 1377: mod_base = OTHER; note = N1-methylpseudouracil
  modified_base 1381: mod_base = OTHER; note = N1-methylpseudouracil
  modified_base 1386: mod_base = OTHER; note = N1-methylpseudouracil
  modified_base 1390: mod_base = OTHER; note = N1-methylpseudouracil
  modified_base 1391: mod_base = OTHER; note = N1-methylpseudouracil
  modified_base 1393: mod_base = OTHER; note = N1-methylpseudouracil
  modified_base 1394: mod_base = OTHER; note = N1-methylpseudouracil
  modified_base 1400: mod_base = OTHER; note = N1-methylpseudouracil
  modified_base 1401: mod_base = OTHER; note = N1-methylpseudouracil
  modified_base 1407: mod_base = OTHER; note = N1-methylpseudouracil
  modified_base 1420: mod_base = OTHER; note = N1-methylpseudouracil
  modified_base 1423: mod_base = OTHER; note = N1-methylpseudouracil
  modified_base 1428: mod_base = OTHER; note = N1-methylpseudouracil
  modified_base 1429: mod_base = OTHER; note = N1-methylpseudouracil
  modified_base 1432: mod_base = OTHER; note = N1-methylpseudouracil
  modified_base 1440: mod_base = OTHER; note = N1-methylpseudouracil
  modified_base 1448: mod_base = OTHER; note = N1-methylpseudouracil
  modified_base 1451: mod_base = OTHER; note = N1-methylpseudouracil
  modified_base 1453: mod_base = OTHER; note = N1-methylpseudouracil
  modified_base 1454: mod_base = OTHER; note = N1-methylpseudouracil
  modified_base 1455: mod_base = OTHER; note = N1-methylpseudouracil
  modified_base 1459: mod_base = OTHER; note = N1-methylpseudouracil
  modified_base 1464: mod_base = OTHER; note = N1-methylpseudouracil
  modified_base 1466: mod_base = OTHER; note = N1-methylpseudouracil
  modified_base 1470: mod_base = OTHER; note = N1-methylpseudouracil
ggaaataagagagaaaagaagagtaagaagaaatataagaccccggcgccgccaccatggcccacgccatggagaacagctggaccatcagcaaggagtaccacatcgacgaggaggtgggcttcgccctgcctaaccctcaggagaacctgcctgacttctacaacgactggatgttcatcgccaagcatctgccggacctgatcgagagcggccagctgagagagagagtggagaagctgaacatgctgagcatcgaccacctgaccgaccacaagagccagagactggccagactggtgctgggctgcatcaccatggcctacgtgtggggcaagggccacggcgacgtgagaaaggtgctgcctagaaacatcgccgtgccttactgccagctgagcaagaagctggagctgcctcctatcctggtgtacgccgactgcgtgctggccaactggaagaagaaggaccctaacaagcctctgacctacgagaacatggacgtgctgttcagcttcagagacggcgactgcagcaagggcttcttcctggtgagcctgctggtggagatcgccgccgccagcgccatcaaggtgatccctaccgtgttcaaggccatgcagatgcaggagagagacaccctgctgaaggccctgttggaaatcgccagctgcctggagaaggcgctgcaggtgttccaccagatccacgaccacgtgaaccctaaggccttcttcagcgtgctgagaatctacctgagcggctggaagggcaaccctcagctgagcgacggactggtatacgagggcttctgggaggaccctaaggagttcgctggaggctccgcgggacagagcagcgtgttccagtgcttcgacgtgctgctgggcatccagcagaccgctggtggcggacacgcagctcagttcctgcaggacatgagaagatacatgcctcctgcccacagaaacttcctgtgcagcctggagagcaaccctagcgtgagagagttcgtgctgagcaagggcgacgccggcctgagagaggcctacgacgcctgcgttaaggctttggtgtcactgagaagctaccacctgcagatcgtgaccaagtacatcctgatccctgccagccagcagcctaaggagaacaagaccagcgaggaccctagcaagctggaggccaagggcaccggcggcaccgacctgatgaacttcctgaagaccgtgagaagcaccaccgagaagagtctgctgaaggagggcggtggaggcggatctggtggaggaggcagctacagactgaagaagatctccaaggaggagaagacccctggctgcgtgaagatcaagaagtgctgataataggctggagcctcggtggcctagcttcttgccccttgggcctccccccagcccctcctccccttcctgcacccgtacccccgtggtctttgaataaagtctgagtgggcggc

SEQ ID NO: 318 - RNA, 1441 nt, synthetic construct
  source 1..1441: mol_type = other RNA
  modified_base 6: mod_base = OTHER; note = N1-methylpseudouracil
  modified_base 24: mod_base = OTHER; note = N1-methylpseudouracil
  modified_base 34: mod_base = OTHER; note = N1-methylpseudouracil
  modified_base 36: mod_base = OTHER; note = N1-methylpseudouracil
  modified_base 58: mod_base = OTHER; note = N1-methylpseudouracil
  modified_base 80: mod_base = OTHER; note = N1-methylpseudouracil
  modified_base 89: mod_base = OTHER; note = N1-methylpseudouracil
  modified_base 114: mod_base = OTHER; note = N1-methylpseudouracil
  modified_base 127: mod_base = OTHER; note = N1-methylpseudouracil
  modified_base 138: mod_base = OTHER; note = N1-methylpseudouracil
  modified_base 145: mod_base = OTHER; note = N1-methylpseudouracil
  modified_base 156: mod_base = OTHER; note = N1-methylpseudouracil
  modified_base 163: mod_base = OTHER; note = N1-methylpseudouracil
  modified_base 175: mod_base = OTHER; note = N1-methylpseudouracil
  modified_base 180: mod_base = OTHER; note = N1-methylpseudouracil
  modified_base 181: mod_base = OTHER; note = N1-methylpseudouracil
  modified_base 187: mod_base = OTHER; note = N1-methylpseudouracil
  modified_base 191: mod_base = OTHER; note = N1-methylpseudouracil
  modified_base 197: mod_base = OTHER; note = N1-methylpseudouracil
  modified_base 208: mod_base = OTHER; note = N1-methylpseudouracil
  modified_base 212: mod_base = OTHER; note = N1-methylpseudouracil
  modified_base 216: mod_base = OTHER; note = N1-methylpseudouracil
  modified_base 217: mod_base = OTHER; note = N1-methylpseudouracil
  modified_base 219: mod_base = OTHER; note = N1-methylpseudouracil
  modified_base 228: mod_base = OTHER; note = N1-methylpseudouracil
  modified_base 232: mod_base = OTHER; note = N1-methylpseudouracil
  modified_base 234: mod_base = OTHER; note = N1-methylpseudouracil
  modified_base 235: mod_base = OTHER; note = N1-methylpseudouracil
  modified_base 238: mod_base = OTHER; note = N1-methylpseudouracil
  modified_base 249: mod_base = OTHER; note = N1-methylpseudouracil
  modified_base 250: mod_base = OTHER; note = N1-methylpseudouracil
  modified_base 259: mod_base = OTHER; note = N1-methylpseudouracil
  modified_base 262: mod_base = OTHER; note = N1-methylpseudouracil
  modified_base 277: mod_base = OTHER; note = N1-methylpseudouracil
  modified_base 289: mod_base = OTHER; note = N1-methylpseudouracil
  modified_base 298: mod_base = OTHER; note = N1-methylpseudouracil
  modified_base 304: mod_base = OTHER; note = N1-methylpseudouracil
  modified_base 307: mod_base = OTHER; note = N1-methylpseudouracil
  modified_base 313: mod_base = OTHER; note = N1-methylpseudouracil
  modified_base 322: mod_base = OTHER; note = N1-methylpseudouracil
  modified_base 346: mod_base = OTHER; note = N1-methylpseudouracil
  modified_base 355: mod_base = OTHER; note = N1-methylpseudouracil
  modified_base 358: mod_base = OTHER; note = N1-methylpseudouracil
  modified_base 361: mod_base = OTHER; note = N1-methylpseudouracil
  modified_base 366: mod_base = OTHER; note = N1-methylpseudouracil
  modified_base 370: mod_base = OTHER; note = N1-methylpseudouracil
  modified_base 376: mod_base = OTHER; note = N1-methylpseudouracil
  modified_base 381: mod_base = OTHER; note = N1-methylpseudouracil
  modified_base 385: mod_base = OTHER; note = N1-methylpseudouracil
  modified_base 387: mod_base = OTHER; note = N1-methylpseudouracil
  modified_base 409: mod_base = OTHER; note = N1-methylpseudouracil
  modified_base 418: mod_base = OTHER; note = N1-methylpseudouracil
  modified_base 421: mod_base = OTHER; note = N1-methylpseudouracil
  modified_base 425: mod_base = OTHER; note = N1-methylpseudouracil
  modified_base 433: mod_base = OTHER; note = N1-methylpseudouracil
  modified_base 439: mod_base = OTHER; note = N1-methylpseudouracil
  modified_base 443: mod_base = OTHER; note = N1-methylpseudouracil
  modified_base 444: mod_base = OTHER; note = N1-methylpseudouracil
  modified_base 447: mod_base = OTHER; note = N1-methylpseudouracil
  modified_base 454: mod_base = OTHER; note = N1-methylpseudouracil
  modified_base 466: mod_base = OTHER; note = N1-methylpseudouracil
  modified_base 472: mod_base = OTHER; note = N1-methylpseudouracil
  modified_base 476: mod_base = OTHER; note = N1-methylpseudouracil
  modified_base 479: mod_base = OTHER; note = N1-methylpseudouracil
  modified_base 481: mod_base = OTHER; note = N1-methylpseudouracil
  modified_base 484: mod_base = OTHER; note = N1-methylpseudouracil
  modified_base 487: mod_base = OTHER; note = N1-methylpseudouracil
  modified_base 489: mod_base = OTHER; note = N1-methylpseudouracil
  modified_base 498: mod_base = OTHER; note = N1-methylpseudouracil
  modified_base 502: mod_base = OTHER; note = N1-methylpseudouracil
  modified_base 505: mod_base = OTHER; note = N1-methylpseudouracil
  modified_base 513: mod_base = OTHER; note = N1-methylpseudouracil
  modified_base 530: mod_base = OTHER; note = N1-methylpseudouracil
  modified_base 539: mod_base = OTHER; note = N1-methylpseudouracil
  modified_base 541: mod_base = OTHER; note = N1-methylpseudouracil
  modified_base 546: mod_base = OTHER; note = N1-methylpseudouracil
  modified_base 556: mod_base = OTHER; note = N1-methylpseudouracil
  modified_base 562: mod_base = OTHER; note = N1-methylpseudouracil
  modified_base 565: mod_base = OTHER; note = N1-methylpseudouracil
  modified_base 567: mod_base = OTHER; note = N1-methylpseudouracil
  modified_base 568: mod_base = OTHER; note = N1-methylpseudouracil
  modified_base 573: mod_base = OTHER; note = N1-methylpseudouracil
  modified_base 574: mod_base = OTHER; note = N1-methylpseudouracil
  modified_base 588: mod_base = OTHER; note = N1-methylpseudouracil
  modified_base 600: mod_base = OTHER; note = N1-methylpseudouracil
  modified_base 601: mod_base = OTHER; note = N1-methylpseudouracil
  modified_base 603: mod_base = OTHER; note = N1-methylpseudouracil
  modified_base 604: mod_base = OTHER; note = N1-methylpseudouracil
  modified_base 607: mod_base = OTHER; note = N1-methylpseudouracil
  modified_base 610: mod_base = OTHER; note = N1-methylpseudouracil
  modified_base 616: mod_base = OTHER; note = N1-methylpseudouracil
  modified_base 619: mod_base = OTHER; note = N1-methylpseudouracil
  modified_base 622: mod_base = OTHER; note = N1-methylpseudouracil
  modified_base 628: mod_base = OTHER; note = N1-methylpseudouracil
  modified_base 646: mod_base = OTHER; note = N1-methylpseudouracil
  modified_base 652: mod_base = OTHER; note = N1-methylpseudouracil
  modified_base 655: mod_base = OTHER; note = N1-methylpseudouracil
  modified_base 659: mod_base = OTHER; note = N1-methylpseudouracil
  modified_base 664: mod_base = OTHER; note = N1-methylpseudouracil
  modified_base 666: mod_base = OTHER; note = N1-methylpseudouracil
  modified_base 667: mod_base = OTHER; note = N1-methylpseudouracil
  modified_base 676: mod_base = OTHER; note = N1-methylpseudouracil
  modified_base 682: mod_base = OTHER; note = N1-methylpseudouracil
  modified_base 700: mod_base = OTHER; note = N1-methylpseudouracil
  modified_base 703: mod_base = OTHER; note = N1-methylpseudouracil
  modified_base 712: mod_base = OTHER; note = N1-methylpseudouracil
  modified_base 714: mod_base = OTHER; note = N1-methylpseudouracil
  modified_base 715: mod_base = OTHER; note = N1-methylpseudouracil
  modified_base 721: mod_base = OTHER; note = N1-methylpseudouracil
  modified_base 729: mod_base = OTHER; note = N1-methylpseudouracil
  modified_base 733: mod_base = OTHER; note = N1-methylpseudouracil
  modified_base 745: mod_base = OTHER; note = N1-methylpseudouracil
  modified_base 751: mod_base = OTHER; note = N1-methylpseudouracil
  modified_base 753: mod_base = OTHER; note = N1-methylpseudouracil
  modified_base 754: mod_base = OTHER; note = N1-methylpseudouracil
  modified_base 763: mod_base = OTHER; note = N1-methylpseudouracil
  modified_base 775: mod_base = OTHER; note = N1-methylpseudouracil
  modified_base 782: mod_base = OTHER; note = N1-methylpseudouracil
  modified_base 789: mod_base = OTHER; note = N1-methylpseudouracil
  modified_base 790: mod_base = OTHER; note = N1-methylpseudouracil
  modified_base 792: mod_base = OTHER; note = N1-methylpseudouracil
  modified_base 793: mod_base = OTHER; note = N1-methylpseudouracil
  modified_base 799: mod_base = OTHER; note = N1-methylpseudouracil
  modified_base 802: mod_base = OTHER; note = N1-methylpseudouracil
  modified_base 808: mod_base = OTHER; note = N1-methylpseudouracil
  modified_base 810: mod_base = OTHER; note = N1-methylpseudouracil
  modified_base 814: mod_base = OTHER; note = N1-methylpseudouracil
  modified_base 822: mod_base = OTHER; note = N1-methylpseudouracil
  modified_base 836: mod_base = OTHER; note = N1-methylpseudouracil
  modified_base 841: mod_base = OTHER; note = N1-methylpseudouracil
  modified_base 853: mod_base = OTHER; note = N1-methylpseudouracil
  modified_base 856: mod_base = OTHER; note = N1-methylpseudouracil
  modified_base 858: mod_base = OTHER; note = N1-methylpseudouracil
  modified_base 867: mod_base = OTHER; note = N1-methylpseudouracil
  modified_base 868: mod_base = OTHER; note = N1-methylpseudouracil
  modified_base 870: mod_base = OTHER; note = N1-methylpseudouracil
  modified_base 881: mod_base = OTHER; note = N1-methylpseudouracil
  modified_base 888: mod_base = OTHER; note = N1-methylpseudouracil
  modified_base 889: mod_base = OTHER; note = N1-methylpseudouracil
  modified_base 893: mod_base = OTHER; note = N1-methylpseudouracil
  modified_base 900: mod_base = OTHER; note = N1-methylpseudouracil
  modified_base 902: mod_base = OTHER; note = N1-methylpseudouracil
  modified_base 919: mod_base = OTHER; note = N1-methylpseudouracil
  modified_base 921: mod_base = OTHER; note = N1-methylpseudouracil
  modified_base 922: mod_base = OTHER; note = N1-methylpseudouracil
  modified_base 927: mod_base = OTHER; note = N1-methylpseudouracil
  modified_base 930: mod_base = OTHER; note = N1-methylpseudouracil
  modified_base 931: mod_base = OTHER; note = N1-methylpseudouracil
  modified_base 937: mod_base = OTHER; note = N1-methylpseudouracil
  modified_base 940: mod_base = OTHER; note = N1-methylpseudouracil
  modified_base 943: mod_base = OTHER; note = N1-methylpseudouracil
  modified_base 949: mod_base = OTHER; note = N1-methylpseudouracil
  modified_base 977: mod_base = OTHER; note = N1-methylpseudouracil
  modified_base 984: mod_base = OTHER; note = N1-methylpseudouracil
  modified_base 985: mod_base = OTHER; note = N1-methylpseudouracil
  modified_base 988: mod_base = OTHER; note = N1-methylpseudouracil
  modified_base 997: mod_base = OTHER; note = N1-methylpseudouracil
  modified_base 1005: mod_base = OTHER; note = N1-methylpseudouracil
  modified_base 1009: mod_base = OTHER; note = N1-methylpseudouracil
  modified_base 1013: mod_base = OTHER; note = N1-methylpseudouracil
  modified_base 1016: mod_base = OTHER; note = N1-methylpseudouracil
  modified_base 1029: mod_base = OTHER; note = N1-methylpseudouracil
  modified_base 1030: mod_base = OTHER; note = N1-methylpseudouracil
  modified_base 1033: mod_base = OTHER; note = N1-methylpseudouracil
  modified_base 1035: mod_base = OTHER; note = N1-methylpseudouracil
  modified_base 1042: mod_base = OTHER; note = N1-methylpseudouracil
  modified_base 1055: mod_base = OTHER; note = N1-methylpseudouracil
  modified_base 1060: mod_base = OTHER; note = N1-methylpseudouracil
  modified_base 1068: mod_base = OTHER; note = N1-methylpseudouracil
  modified_base 1069: mod_base = OTHER; note = N1-methylpseudouracil
  modified_base 1072: mod_base = OTHER; note = N1-methylpseudouracil
  modified_base 1075: mod_base = OTHER; note = N1-methylpseudouracil
  modified_base 1096: mod_base = OTHER; note = N1-methylpseudouracil
  modified_base 1107: mod_base = OTHER; note = N1-methylpseudouracil
  modified_base 1116: mod_base = OTHER; note = N1-methylpseudouracil
  modified_base 1120: mod_base = OTHER; note = N1-methylpseudouracil
  modified_base 1121: mod_base = OTHER; note = N1-methylpseudouracil
  modified_base 1129: mod_base = OTHER; note = N1-methylpseudouracil
  modified_base 1130: mod_base = OTHER; note = N1-methylpseudouracil
  modified_base 1132: mod_base = OTHER; note = N1-methylpseudouracil
  modified_base 1134: mod_base = OTHER; note = N1-methylpseudouracil
  modified_base 1136: mod_base = OTHER; note = N1-methylpseudouracil
  modified_base 1138: mod_base = OTHER; note = N1-methylpseudouracil
  modified_base 1146: mod_base = OTHER; note = N1-methylpseudouracil
  modified_base 1153: mod_base = OTHER; note = N1-methylpseudouracil
  modified_base 1159: mod_base = OTHER; note = N1-methylpseudouracil
  modified_base 1162: mod_base = OTHER; note = N1-methylpseudouracil
  modified_base 1170: mod_base = OTHER; note = N1-methylpseudouracil
  modified_base 1174: mod_base = OTHER; note = N1-methylpseudouracil
  modified_base 1177: mod_base = OTHER; note = N1-methylpseudouracil
  modified_base 1180: mod_base = OTHER; note = N1-methylpseudouracil
  modified_base 1184: mod_base = OTHER; note = N1-methylpseudouracil
  modified_base 1199: mod_base = OTHER; note = N1-methylpseudouracil
  modified_base 1234: mod_base = OTHER; note = N1-methylpseudouracil
  modified_base 1264: mod_base = OTHER; note = N1-methylpseudouracil
  modified_base 1267: mod_base = OTHER; note = N1-methylpseudouracil
  modified_base 1272: mod_base = OTHER; note = N1-methylpseudouracil
  modified_base 1273: mod_base = OTHER; note = N1-methylpseudouracil
  modified_base 1276: mod_base = OTHER; note = N1-methylpseudouracil
  modified_base 1285: mod_base = OTHER; note = N1-methylpseudouracil
  modified_base 1305: mod_base = OTHER; note = N1-methylpseudouracil
  modified_base 1309: mod_base = OTHER; note = N1-methylpseudouracil
  modified_base 1312: mod_base = OTHER; note = N1-methylpseudouracil
  modified_base 1323: mod_base = OTHER; note = N1-methylpseudouracil
  modified_base 1326: mod_base = OTHER; note = N1-methylpseudouracil
  modified_base 1329: mod_base = OTHER; note = N1-methylpseudouracil
  modified_base 1334: mod_base = OTHER; note = N1-methylpseudouracil
  modified_base 1341: mod_base = OTHER; note = N1-methylpseudouracil
  modified_base 1345: mod_base = OTHER; note = N1-methylpseudouracil
  modified_base 1350: mod_base = OTHER; note = N1-methylpseudouracil
  modified_base 1354: mod_base = OTHER; note = N1-methylpseudouracil
  modified_base 1355: mod_base = OTHER; note = N1-methylpseudouracil
  modified_base 1357: mod_base = OTHER; note = N1-methylpseudouracil
  modified_base 1358: mod_base = OTHER; note = N1-methylpseudouracil
  modified_base 1364: mod_base = OTHER; note = N1-methylpseudouracil
  modified_base 1365: mod_base = OTHER; note = N1-methylpseudouracil
  modified_base 1371: mod_base = OTHER; note = N1-methylpseudouracil
  modified_base 1384: mod_base = OTHER; note = N1-methylpseudouracil
  modified_base 1387: mod_base = OTHER; note = N1-methylpseudouracil
  modified_base 1392: mod_base = OTHER; note = N1-methylpseudouracil
  modified_base 1393: mod_base = OTHER; note = N1-methylpseudouracil
  modified_base 1396: mod_base = OTHER; note = N1-methylpseudouracil
  modified_base 1404: mod_base = OTHER; note = N1-methylpseudouracil
  modified_base 1412: mod_base = OTHER; note = N1-methylpseudouracil
  modified_base 1415: mod_base = OTHER; note = N1-methylpseudouracil
  modified_base 1417: mod_base = OTHER; note = N1-methylpseudouracil
  modified_base 1418: mod_base = OTHER; note = N1-methylpseudouracil
  modified_base 1419: mod_base = OTHER; note = N1-methylpseudouracil
  modified_base 1423: mod_base = OTHER; note = N1-methylpseudouracil
  modified_base 1428: mod_base = OTHER; note = N1-methylpseudouracil
  modified_base 1430: mod_base = OTHER; note = N1-methylpseudouracil
  modified_base 1434: mod_base = OTHER; note = N1-methylpseudouracil
ggaaataagagagaaaagaagagtaagaagaaatataagaccccggcgccgccaccatgggcagcagcaagagcaagcctaaggaccctagccagagaagaagaggcggaggctccgcccacgccatggagaacagctggaccatcagcaaggagtaccacatcgacgaggaggtgggcttcgccctgcctaaccctcaggagaacctgcctgacttctacaacgactggatgttcatcgccaagcacttgccggacctgatcgagagcggccagctgagagagagagtggagaagctgaacatgctgagcatcgaccacctgaccgaccacaagagccagagactggccagactggtgctgggctgcatcaccatggcctacgtgtggggcaagggccacggcgacgtgagaaaggtgctgcctagaaacatcgccgtgccttactgccagctgagcaagaagctggagctgcctcctatcctggtgtacgccgactgcgtgctggccaactggaagaagaaggaccctaacaagcctctgacctacgagaacatggacgtgctgttcagcttcagagacggcgactgcagcaagggcttcttcctggtgagcctgctggtggagatcgccgccgccagcgccatcaaggtgatccctaccgtgttcaaggccatgcagatgcaggagagagacaccctgctgaaggccctgttggagatagccagctgcctggagaaggcactgcaggtgttccaccagatccacgaccacgtgaaccctaaggccttcttcagcgtgctgagaatctacctgagcggctggaagggcaaccctcagctgagcgacggcctggtctacgagggcttctgggaggaccctaaggagttcgctggcggctctgccggccagagcagcgtgttccagtgcttcgacgtgctgctgggcatccaacaaaccgcaggaggcggccacgctgcacagttcctgcaggacatgagaagatacatgcctcctgcccacagaaacttcctgtgcagcctggagagcaaccctagcgtgagagagttcgtgctgagcaagggcgacgccggcctgagagaggcctacgacgcctgcgttaaggcccttgtgtctctgagaagctaccacctgcagatcgtgaccaagtacatcctgatccctgccagccagcagcctaaggagaacaagaccagcgaggacccaagcaagctggaggccaagggcaccggcggcaccgacctgatgaacttcctgaagaccgtgagaagcaccaccgagaagtccctcctgaaggagggctgataataggctggagcctcggtggcctagcttcttgccccttgggcctccccccagcccctcctccccttcctgcacccgtacccccgtggtctttgaataaagtctgagtgggcggc

SEQ ID NO: 319 - RNA, 1383 nt, synthetic construct
  source 1..1383: mol_type = other RNA
  modified_base 6: mod_base = OTHER; note = N1-methylpseudouracil
  modified_base 24: mod_base = OTHER; note = N1-methylpseudouracil
  modified_base 34: mod_base = OTHER; note = N1-methylpseudouracil
  modified_base 36: mod_base = OTHER; note = N1-methylpseudouracil
  modified_base 48: mod_base = OTHER; note = N1-methylpseudouracil
  modified_base 52: mod_base = OTHER; note = N1-methylpseudouracil
  modified_base 56: mod_base = OTHER; note = N1-methylpseudouracil
  modified_base 62: mod_base = OTHER; note = N1-methylpseudouracil
  modified_base 63: mod_base = OTHER; note = N1-methylpseudouracil
  modified_base 65: mod_base = OTHER; note = N1-methylpseudouracil
  modified_base 66: mod_base = OTHER; note = N1-methylpseudouracil
  modified_base 77: mod_base = OTHER; note = N1-methylpseudouracil
  modified_base 78: mod_base = OTHER; note = N1-methylpseudouracil
  modified_base 79: mod_base = OTHER; note = N1-methylpseudouracil
  modified_base 83: mod_base = OTHER; note = N1-methylpseudouracil
  modified_base 85: mod_base = OTHER; note = N1-methylpseudouracil
  modified_base 88: mod_base = OTHER; note = N1-methylpseudouracil
  modified_base 89: mod_base = OTHER; note = N1-methylpseudouracil
  modified_base 90: mod_base = OTHER; note = N1-methylpseudouracil
  modified_base 91: mod_base = OTHER; note = N1-methylpseudouracil
  modified_base 99: mod_base = OTHER; note = N1-methylpseudouracil
  modified_base 105: mod_base = OTHER; note = N1-methylpseudouracil
  modified_base 128: mod_base = OTHER; note = N1-methylpseudouracil
  modified_base 139: mod_base = OTHER; note = N1-methylpseudouracil
  modified_base 141: mod_base = OTHER; note = N1-methylpseudouracil
  modified_base 145: mod_base = OTHER; note = N1-methylpseudouracil
  modified_base 163: mod_base = OTHER; note = N1-methylpseudouracil
  modified_base 165: mod_base = OTHER; note = N1-methylpseudouracil
  modified_base 166: mod_base = OTHER; note = N1-methylpseudouracil
  modified_base 168: mod_base = OTHER; note = N1-methylpseudouracil
  modified_base 170: mod_base = OTHER; note = N1-methylpseudouracil
  modified_base 179: mod_base = OTHER; note = N1-methylpseudouracil
  modified_base 183: mod_base = OTHER; note = N1-methylpseudouracil
  modified_base 187: mod_base = OTHER; note = N1-methylpseudouracil
  modified_base 188: mod_base = OTHER; note = N1-methylpseudouracil
  modified_base 189: mod_base = OTHER; note = N1-methylpseudouracil
  modified_base 198: mod_base = OTHER; note = N1-methylpseudouracil
  modified_base 199: mod_base = OTHER; note = N1-methylpseudouracil
  modified_base 200: mod_base = OTHER; note = N1-methylpseudouracil
  modified_base 201: mod_base = OTHER; note = N1-methylpseudouracil
  modified_base 205: mod_base = OTHER; note = N1-methylpseudouracil
  modified_base 216: mod_base = OTHER; note = N1-methylpseudouracil
  modified_base 223: mod_base = OTHER; note = N1-methylpseudouracil
  modified_base 238: mod_base = OTHER; note = N1-methylpseudouracil
  modified_base 243: mod_base = OTHER; note = N1-methylpseudouracil
  modified_base 247: mod_base = OTHER; note = N1-methylpseudouracil
  modified_base 250: mod_base = OTHER; note = N1-methylpseudouracil
  modified_base 256: mod_base = OTHER; note = N1-methylpseudouracil
  modified_base 258: mod_base = OTHER; note = N1-methylpseudouracil
  modified_base 260: mod_base = OTHER; note = N1-methylpseudouracil
  modified_base 261: mod_base = OTHER; note = N1-methylpseudouracil
  modified_base 264: mod_base = OTHER; note = N1-methylpseudouracil
  modified_base 267: mod_base = OTHER; note = N1-methylpseudouracil
  modified_base 271: mod_base = OTHER; note = N1-methylpseudouracil
  modified_base 274: mod_base = OTHER; note = N1-methylpseudouracil
  modified_base 280: mod_base = OTHER; note = N1-methylpseudouracil
  modified_base 281: mod_base = OTHER; note = N1-methylpseudouracil
  modified_base 283: mod_base = OTHER; note = N1-methylpseudouracil
  modified_base 288: mod_base = OTHER; note = N1-methylpseudouracil
  modified_base 290: mod_base = OTHER; note = N1-methylpseudouracil
  modified_base 293: mod_base = OTHER; note = N1-methylpseudouracil
  modified_base 294: mod_base = OTHER; note = N1-methylpseudouracil
  modified_base 295: mod_base = OTHER; note = N1-methylpseudouracil
  modified_base 303: mod_base = OTHER; note = N1-methylpseudouracil
  modified_base 306: mod_base = OTHER; note = N1-methylpseudouracil
  modified_base 308: mod_base = OTHER; note = N1-methylpseudouracil
  modified_base 314: mod_base = OTHER; note = N1-methylpseudouracil
  modified_base 315: mod_base = OTHER; note = N1-methylpseudouracil
  modified_base 319: mod_base = OTHER; note = N1-methylpseudouracil
  modified_base 320: mod_base = OTHER; note = N1-methylpseudouracil
  modified_base 322: mod_base = OTHER; note = N1-methylpseudouracil
  modified_base 324: mod_base = OTHER; note = N1-methylpseudouracil
  modified_base 325: mod_base = OTHER; note = N1-methylpseudouracil
  modified_base 333: mod_base = OTHER; note = N1-methylpseudouracil
  modified_base 335: mod_base = OTHER; note = N1-methylpseudouracil
  modified_base 336: mod_base = OTHER; note = N1-methylpseudouracil
  modified_base 337: mod_base = OTHER; note = N1-methylpseudouracil
  modified_base 343: mod_base = OTHER; note = N1-methylpseudouracil
  modified_base 349: mod_base = OTHER; note = N1-methylpseudouracil
  modified_base 351: mod_base = OTHER; note = N1-methylpseudouracil
  modified_base 358: mod_base = OTHER; note = N1-methylpseudouracil
  modified_base 369: mod_base = OTHER; note = N1-methylpseudouracil
  modified_base 372: mod_base = OTHER; note = N1-methylpseudouracil
  modified_base 373: mod_base = OTHER; note = N1-methylpseudouracil
  modified_base 378: mod_base = OTHER; note = N1-methylpseudouracil
  modified_base 379: mod_base = OTHER; note = N1-methylpseudouracil
  modified_base 381: mod_base = OTHER; note = N1-methylpseudouracil
  modified_base 382: mod_base = OTHER; note = N1-methylpseudouracil
  modified_base 383: mod_base = OTHER; note = N1-methylpseudouracil
  modified_base 385: mod_base = OTHER; note = N1-methylpseudouracil
  modified_base 390: mod_base = OTHER; note = N1-methylpseudouracil
  modified_base 399: mod_base = OTHER; note = N1-methylpseudouracil
  modified_base 401: mod_base = OTHER; note = N1-methylpseudouracil
  modified_base 405: mod_base = OTHER; note = N1-methylpseudouracil
  modified_base 408: mod_base = OTHER; note = N1-methylpseudouracil
  modified_base 411: mod_base = OTHER; note = N1-methylpseudouracil
  modified_base 417: mod_base = OTHER; note = N1-methylpseudouracil
  modified_base 420: mod_base = OTHER; note = N1-methylpseudouracil
  modified_base 423: mod_base = OTHER; note = N1-methylpseudouracil
  modified_base 431: mod_base = OTHER; note = N1-methylpseudouracil
  modified_base 432: mod_base = OTHER; note = N1-methylpseudouracil
  modified_base 433: mod_base = OTHER; note = N1-methylpseudouracil
  modified_base 434: mod_base = OTHER; note = N1-methylpseudouracil
  modified_base 438: mod_base = OTHER; note = N1-methylpseudouracil
  modified_base 439: mod_base = OTHER; note = N1-methylpseudouracil
  modified_base 441: mod_base = OTHER; note = N1-methylpseudouracil
  modified_base 450: mod_base = OTHER; note = N1-methylpseudouracil
  modified_base 458: mod_base = OTHER; note = N1-methylpseudouracil
  modified_base 459: mod_base = OTHER; note = N1-methylpseudouracil
  modified_base 464: mod_base = OTHER; note = N1-methylpseudouracil
  modified_base 465: mod_base = OTHER; note = N1-methylpseudouracil
  modified_base 469: mod_base = OTHER; note = N1-methylpseudouracil
  modified_base 473: mod_base = OTHER; note = N1-methylpseudouracil
  modified_base 474: mod_base = OTHER; note = N1-methylpseudouracil
  modified_base 482: mod_base = OTHER; note = N1-methylpseudouracil
  modified_base 485: mod_base = OTHER; note = N1-methylpseudouracil
  modified_base 486: mod_base = OTHER; note = N1-methylpseudouracil
  modified_base 488: mod_base = OTHER; note = N1-methylpseudouracil
  modified_base 490: mod_base = OTHER; note = N1-methylpseudouracil
  modified_base 497: mod_base = OTHER; note = N1-methylpseudouracil
  modified_base 503: mod_base = OTHER; note = N1-methylpseudouracil
  modified_base 504: mod_base = OTHER; note = N1-methylpseudouracil
  modified_base 511: mod_base = OTHER; note = N1-methylpseudouracil
  modified_base 512: mod_base = OTHER; note = N1-methylpseudouracil
  modified_base 513: mod_base = OTHER; note = N1-methylpseudouracil
  modified_base 518: mod_base = OTHER; note = N1-methylpseudouracil
  modified_base 519: mod_base = OTHER; note = N1-methylpseudouracil
  modified_base 525: mod_base = OTHER; note = N1-methylpseudouracil
  modified_base 527: mod_base = OTHER; note = N1-methylpseudouracil
  modified_base 528: mod_base = OTHER; note = N1-methylpseudouracil
  modified_base 540: mod_base = OTHER; note = N1-methylpseudouracil
  modified_base 544: mod_base = OTHER; note = N1-methylpseudouracil
  modified_base 546: mod_base = OTHER; note = N1-methylpseudouracil
  modified_base 547: mod_base = OTHER; note = N1-methylpseudouracil
  modified_base 549: mod_base = OTHER; note = N1-methylpseudouracil
  modified_base 550: mod_base = OTHER; note = N1-methylpseudouracil
  modified_base 558: mod_base = OTHER; note = N1-methylpseudouracil
  modified_base 564: mod_base = OTHER; note = N1-methylpseudouracil
  modified_base 568: mod_base = OTHER; note = N1-methylpseudouracil
  modified_base 569: mod_base = OTHER; note = N1-methylpseudouracil
  modified_base 571: mod_base = OTHER; note = N1-methylpseudouracil
  modified_base 583: mod_base = OTHER; note = N1-methylpseudouracil
  modified_base 584: mod_base = OTHER; note = N1-methylpseudouracil
  modified_base 586: mod_base = OTHER; note = N1-methylpseudouracil
  modified_base 589: mod_base = OTHER; note = N1-methylpseudouracil
  modified_base 592: mod_base = OTHER; note = N1-methylpseudouracil
  modified_base 596: mod_base = OTHER; note = N1-methylpseudouracil
  modified_base 597: mod_base = OTHER; note = N1-methylpseudouracil
  modified_base 613: mod_base = OTHER; note = N1-methylpseudouracil
  modified_base 618: mod_base = OTHER; note = N1-methylpseudouracil
  modified_base 621: mod_base = OTHER; note = N1-methylpseudouracil
  modified_base 624: mod_base = OTHER; note = N1-methylpseudouracil
  modified_base 625: mod_base = OTHER; note = N1-methylpseudouracil
  modified_base 629: mod_base = OTHER; note = N1-methylpseudouracil
  modified_base 631: mod_base = OTHER; note = N1-methylpseudouracil
  modified_base 648: mod_base = OTHER; note = N1-methylpseudouracil
  modified_base 649: mod_base = OTHER; note = N1-methylpseudouracil
  modified_base 651: mod_base = OTHER; note = N1-methylpseudouracil
  modified_base 656: mod_base = OTHER; note = N1-methylpseudouracil
  modified_base 657: mod_base = OTHER; note = N1-methylpseudouracil
  modified_base 660: mod_base = OTHER; note = N1-methylpseudouracil
  modified_base 668: mod_base = OTHER; note = N1-methylpseudouracil
  modified_base 672: mod_base = OTHER; note = N1-methylpseudouracil
  modified_base 682: mod_base = OTHER; note = N1-methylpseudouracil
  modified_base 688: mod_base = OTHER; note = N1-methylpseudouracil
  modified_base 689: mod_base = OTHER; note = N1-methylpseudouracil
  modified_base 690: mod_base = OTHER; note = N1-methylpseudouracil
  modified_base 700: mod_base = OTHER; note = N1-methylpseudouracil
  modified_base 704: mod_base = OTHER; note = N1-methylpseudouracil
  modified_base 705: mod_base = OTHER; note = N1-methylpseudouracil
  modified_base 706: mod_base = OTHER; note = N1-methylpseudouracil
  modified_base 710: mod_base = OTHER; note = N1-methylpseudouracil
  modified_base 711: mod_base = OTHER; note = N1-methylpseudouracil
  modified_base 713: mod_base = OTHER; note = N1-methylpseudouracil
  modified_base 723: mod_base = OTHER; note = N1-methylpseudouracil
  modified_base 724: mod_base = OTHER; note = N1-methylpseudouracil
  modified_base 733: mod_base = OTHER; note = N1-methylpseudouracil
  modified_base 735: mod_base = OTHER; note = N1-methylpseudouracil
  modified_base 747: mod_base = OTHER; note = N1-methylpseudouracil
  modified_base 758: mod_base = OTHER; note = N1-methylpseudouracil
  modified_base 759: mod_base = OTHER; note = N1-methylpseudouracil
  modified_base 762: mod_base = OTHER; note = N1-methylpseudouracil
  modified_base 768: mod_base = OTHER; note = N1-methylpseudouracil
  modified_base 769: mod_base = OTHER; note = N1-methylpseudouracil
  modified_base 775: mod_base = OTHER; note = N1-methylpseudouracil
  modified_base 785: mod_base = OTHER; note = N1-methylpseudouracil
  modified_base 787: mod_base = OTHER; note = N1-methylpseudouracil
  modified_base 807: mod_base = OTHER; note = N1-methylpseudouracil
  modified_base 811: mod_base = OTHER; note = N1-methylpseudouracil
  modified_base 815: mod_base = OTHER; note = N1-methylpseudouracil
  modified_base 816: mod_base = OTHER; note = N1-methylpseudouracil
  modified_base 817: mod_base = OTHER; note = N1-methylpseudouracil
  modified_base 834: mod_base = OTHER; note = N1-methylpseudouracil
  modified_base 837: mod_base = OTHER; note = N1-methylpseudouracil
  modified_base 840: mod_base = OTHER; note = N1-methylpseudouracil
  modified_base 842: mod_base = OTHER; note = N1-methylpseudouracil
  modified_base 845: mod_base = OTHER; note = N1-methylpseudouracil
  modified_base 846: mod_base = OTHER; note = N1-methylpseudouracil
  modified_base 848: mod_base = OTHER; note = N1-methylpseudouracil
  modified_base 849: mod_base = OTHER; note = N1-methylpseudouracil
  modified_base 850: mod_base = OTHER; note = N1-methylpseudouracil
  modified_base 853: mod_base = OTHER; note = N1-methylpseudouracil
  modified_base 862: mod_base = OTHER; note = N1-methylpseudouracil
  modified_base 873: mod_base = OTHER; note = N1-methylpseudouracil
  modified_base 876: mod_base = OTHER; note = N1-methylpseudouracil
  modified_base 877: mod_base = OTHER; note = N1-methylpseudouracil
  modified_base 880: mod_base = OTHER; note = N1-methylpseudouracil
  modified_base 886: mod_base = OTHER; note = N1-methylpseudouracil
  modified_base 897: mod_base = OTHER; note = N1-methylpseudouracil
  modified_base 899: mod_base = OTHER; note = N1-methylpseudouracil
  modified_base 902: mod_base = OTHER; note = N1-methylpseudouracil
  modified_base 912: mod_base = OTHER; note = N1-methylpseudouracil
  modified_base 913: mod_base = OTHER; note = N1-methylpseudouracil
  modified_base 923: mod_base = OTHER; note = N1-methylpseudouracil
  modified_base 924: mod_base = OTHER; note = N1-methylpseudouracil
  modified_base 927: mod_base = OTHER; note = N1-methylpseudouracil
  modified_base 930: mod_base = OTHER; note = N1-methylpseudouracil
  modified_base 932: mod_base = OTHER; note = N1-methylpseudouracil
  modified_base 935: mod_base = OTHER; note = N1-methylpseudouracil
  modified_base 936: mod_base = OTHER; note = N1-methylpseudouracil
  modified_base 938: mod_base = OTHER; note = N1-methylpseudouracil
  modified_base 952: mod_base = OTHER; note = N1-methylpseudouracil
  modified_base 956: mod_base = OTHER; note = N1-methylpseudouracil
  modified_base 957: mod_base = OTHER; note = N1-methylpseudouracil
  modified_base 963: mod_base = OTHER; note = N1-methylpseudouracil
  modified_base 967: mod_base = OTHER; note = N1-methylpseudouracil
  modified_base 968: mod_base = OTHER; note = N1-methylpseudouracil
  modified_base 969: mod_base = OTHER; note = N1-methylpseudouracil
  modified_base 970: mod_base = OTHER; note = N1-methylpseudouracil
  modified_base 974: mod_base = OTHER; note = N1-methylpseudouracil
  modified_base 975: mod_base = OTHER; note = N1-methylpseudouracil
  modified_base 978: mod_base = OTHER; note = N1-methylpseudouracil
  modified_base 982: mod_base = OTHER; note = N1-methylpseudouracil
  modified_base 983: mod_base = OTHER; note = N1-methylpseudouracil
  modified_base 985: mod_base = OTHER; note = N1-methylpseudouracil
  modified_base 987: mod_base = OTHER; note = N1-methylpseudouracil
  modified_base 988: mod_base = OTHER; note = N1-methylpseudouracil
  modified_base 990: mod_base = OTHER; note = N1-methylpseudouracil
  modified_base 996: mod_base = OTHER; note = N1-methylpseudouracil
  modified_base 1000: mod_base = OTHER; note = N1-methylpseudouracil
  modified_base 1001: mod_base = OTHER; note = N1-methylpseudouracil
  modified_base 1005: mod_base = OTHER; note = N1-methylpseudouracil
  modified_base 1008: mod_base = OTHER; note = N1-methylpseudouracil
  modified_base 1016: mod_base = OTHER; note = N1-methylpseudouracil
  modified_base 1022: mod_base = OTHER; note = N1-methylpseudouracil
  modified_base 1024: mod_base = OTHER; note = N1-methylpseudouracil
  modified_base 1030: mod_base = OTHER; note = N1-methylpseudouracil
  modified_base 1032: mod_base = OTHER; note = N1-methylpseudouracil
  modified_base 1034: mod_base = OTHER; note = N1-methylpseudouracil
  modified_base 1038: mod_base = OTHER; note = N1-methylpseudouracil
  modified_base 1041: mod_base = OTHER; note = N1-methylpseudouracil
  modified_base 1050: mod_base = OTHER; note = N1-methylpseudouracil
  modified_base 1053: mod_base = OTHER; note = N1-methylpseudouracil
  modified_base 1066: mod_base = OTHER; note = N1-methylpseudouracil
  modified_base 1075: mod_base = OTHER; note = N1-methylpseudouracil
  modified_base 1078: mod_base = OTHER; note = N1-methylpseudouracil
  modified_base 1079: mod_base = OTHER; note = N1-methylpseudouracil
  modified_base 1082: mod_base = OTHER; note = N1-methylpseudouracil
  modified_base 1088: mod_base = OTHER; note = N1-methylpseudouracil
  modified_base 1090: mod_base = OTHER; note = N1-methylpseudouracil
  modified_base 1094: mod_base = OTHER; note = N1-methylpseudouracil
  modified_base 1096: mod_base = OTHER; note = N1-methylpseudouracil
  modified_base 1097: mod_base = OTHER; note = N1-methylpseudouracil
  modified_base 1098: mod_base = OTHER; note = N1-methylpseudouracil
  modified_base 1103: mod_base = OTHER; note = N1-methylpseudouracil
  modified_base 1108: mod_base = OTHER; note = N1-methylpseudouracil
  modified_base 1110: mod_base = OTHER; note = N1-methylpseudouracil
  modified_base 1114: mod_base = OTHER; note = N1-methylpseudouracil
  modified_base 1117: mod_base = OTHER; note = N1-methylpseudouracil
  modified_base 1121: mod_base = OTHER; note = N1-methylpseudouracil
  modified_base 1128: mod_base = OTHER; note = N1-methylpseudouracil
  modified_base 1130: mod_base = OTHER; note = N1-methylpseudouracil
  modified_base 1131: mod_base = OTHER; note = N1-methylpseudouracil
  modified_base 1134: mod_base = OTHER; note = N1-methylpseudouracil
  modified_base 1138: mod_base = OTHER; note = N1-methylpseudouracil
  modified_base 1140: mod_base = OTHER; note = N1-methylpseudouracil
  modified_base 1141: mod_base = OTHER; note = N1-methylpseudouracil
  modified_base 1142: mod_base = OTHER; note = N1-methylpseudouracil
  modified_base 1143: mod_base = OTHER; note = N1-methylpseudouracil
  modified_base 1147: mod_base = OTHER; note = N1-methylpseudouracil
  modified_base 1149: mod_base = OTHER; note = N1-methylpseudouracil
  modified_base 1150: mod_base = OTHER; note = N1-methylpseudouracil
  modified_base 1151: mod_base = OTHER; note = N1-methylpseudouracil
  modified_base 1157: mod_base = OTHER; note = N1-methylpseudouracil
  modified_base 1161: mod_base = OTHER; note = N1-methylpseudouracil
  modified_base 1164: mod_base = OTHER; note = N1-methylpseudouracil
  modified_base 1165: mod_base = OTHER; note = N1-methylpseudouracil
  modified_base 1175: mod_base = OTHER; note = N1-methylpseudouracil
  modified_base 1179: mod_base = OTHER; note = N1-methylpseudouracil
  modified_base 1188: mod_base = OTHER; note = N1-methylpseudouracil
  modified_base 1200: mod_base = OTHER; note = N1-methylpseudouracil
  modified_base 1201: mod_base = OTHER; note = N1-methylpseudouracil
  modified_base 1208: mod_base = OTHER; note = N1-methylpseudouracil
  modified_base 1209: mod_base = OTHER; note = N1-methylpseudouracil
  modified_base 1210: mod_base = OTHER; note = N1-methylpseudouracil
  modified_base 1212: mod_base = OTHER; note = N1-methylpseudouracil
  modified_base 1214: mod_base = OTHER; note = N1-methylpseudouracil
  modified_base 1216: mod_base = OTHER; note = N1-methylpseudouracil
  modified_base 1226: mod_base = OTHER; note = N1-methylpseudouracil
  modified_base 1229: mod_base = OTHER; note = N1-methylpseudouracil
  modified_base 1231: mod_base = OTHER; note = N1-methylpseudouracil
  modified_base 1234: mod_base = OTHER; note = N1-methylpseudouracil
  modified_base 1238: mod_base = OTHER; note = N1-methylpseudouracil
  modified_base 1241: mod_base = OTHER; note = N1-methylpseudouracil
  modified_base 1244: mod_base = OTHER; note = N1-methylpseudouracil
  modified_base 1245: mod_base = OTHER; note = N1-methylpseudouracil
  modified_base 1252: mod_base = OTHER; note = N1-methylpseudouracil
  modified_base 1255: mod_base = OTHER; note = N1-methylpseudouracil
  modified_base 1259: mod_base = OTHER; note = N1-methylpseudouracil
  modified_base 1264: mod_base = OTHER; note = N1-methylpseudouracil
  modified_base 1265: mod_base = OTHER; note = N1-methylpseudouracil
  modified_base 1268: mod_base = OTHER; note = N1-methylpseudouracil
  modified_base 1271: mod_base = OTHER; note = N1-methylpseudouracil
  modified_base 1276: mod_base = OTHER; note = N1-methylpseudouracil
  modified_base 1283: mod_base = OTHER; note = N1-methylpseudouracil
  modified_base 1287: mod_base = OTHER; note = N1-methylpseudouracil
  modified_base 1293: mod_base = OTHER; note = N1-methylpseudouracil
  modified_base 1296: mod_base = OTHER; note = N1-methylpseudouracil
  modified_base 1297: mod_base = OTHER; note = N1-methylpseudouracil
  modified_base 1299: mod_base = OTHER; note = N1-methylpseudouracil
  modified_base 1300: mod_base = OTHER; note = N1-methylpseudouracil
  modified_base 1306: mod_base = OTHER; note = N1-methylpseudouracil
  modified_base 1307: mod_base = OTHER; note = N1-methylpseudouracil
  modified_base 1313: mod_base = OTHER; note = N1-methylpseudouracil
  modified_base 1326: mod_base = OTHER; note = N1-methylpseudouracil
  modified_base 1329: mod_base = OTHER; note = N1-methylpseudouracil
  modified_base 1334: mod_base = OTHER; note = N1-methylpseudouracil
  modified_base 1335: mod_base = OTHER; note = N1-methylpseudouracil
  modified_base 1338: mod_base = OTHER; note = N1-methylpseudouracil
  modified_base 1346: mod_base = OTHER; note = N1-methylpseudouracil
  modified_base 1354: mod_base = OTHER; note = N1-methylpseudouracil
  modified_base 1357: mod_base = OTHER; note = N1-methylpseudouracil
  modified_base 1359: mod_base = OTHER; note = N1-methylpseudouracil
  modified_base 1360: mod_base = OTHER; note = N1-methylpseudouracil
  modified_base 1361: mod_base = OTHER; note = N1-methylpseudouracil
  modified_base 1365: mod_base = OTHER; note = N1-methylpseudouracil
  modified_base 1370: mod_base = OTHER; note = N1-methylpseudouracil
  modified_base 1372: mod_base = OTHER; note = N1-methylpseudouracil
  modified_base 1376: mod_base = OTHER; note = N1-methylpseudouracil
ggaaataagagagaaaagaagagtaagaagaaatataagagccaccatgagtgggtgcccattcttaggaaacaactttggatatacttttaagaaactccccgtagaaggcagcgaagaagacaaatcacaaaccggtgtgaatagagccagcaaaggaggtcttatctacgggaactacctccatttggagaaagttttgaatgcacaagaactgcaaagtgaaaccaagggaaataagatccatgatgaacatctcttcatcataactcatcaagcttatgaactctggtttaagcaaatcctctgggagttggattctgttcgagagatctttcagaatggccatgtcagagatgaaaggaacatgcttaaggttgtttctcggatgcaccgagtgtcagtgatcctgaaactgctggtgcagcagttttccattctggagacgatgacagccttggacttcaatgacttcagagagtacttatctccagcatcaggcttccagagtttgcaattccgactattagagaacaagataggtgttcttcagaacatgagagtcccttataacagaagacattatcgtgataacttcaaaggagaagagaatgaactgctacttaaatctgagcaggagaagacacttctggaattagtggaggcatggctggaaagaactccaggtttagagccacatggatttaacttctggggaaagcttgagaagaatatcaccagaggcctggaagaggaattcataaggattcaggctaaagaagagtctgaagagaaagaggaacaggtggctgaatttcagaagcagaaggaggtgctactgtccttatttgatgagaaacgtcacgaacacctccttagtaaaggtgaaagacggctgtcatacagagcacttcagggagcattgatgatatacttctacagggaggagcctaggttccaggtgccttttcagttgctgacttctcttatggacatagattcactgatgaccaaatggagatataaccatgtgtgcatggtgcacagaatgctgggcagcaaagctggcaccggtggttcctcaggctatcactatttacgatcaactgtgagtgataggtacaaggtcttcgtcgatcttttcaatctttcaacatacctgattccccgacactggataccgaagatgaacccaaccattcacaaatttctatatacagcagaatactgtgatagctcctacttcagcagtgatgaatcagattgataataggctggagcctcggtggccatgcttcttgccccttgggcctccccccagcccctcctccccttcctgcacccgtacccccgtggtctttgaataaagtctgagtgggcggc

SEQ ID NO: 320 - RNA, 1485 nt, synthetic construct
  source 1..1485: mol_type = other RNA
  modified_base 6: mod_base = OTHER; note = N1-methylpseudouracil
  modified_base 24: mod_base = OTHER; note = N1-methylpseudouracil
  modified_base 34: mod_base = OTHER; note = N1-methylpseudouracil
  modified_base 36: mod_base = OTHER; note = N1-methylpseudouracil
  modified_base 48: mod_base = OTHER; note = N1-methylpseudouracil
  modified_base 70: mod_base = OTHER; note = N1-methylpseudouracil
  modified_base 79: mod_base = OTHER; note = N1-methylpseudouracil
  modified_base 104: mod_base = OTHER; note = N1-methylpseudouracil
  modified_base 107: mod_base = OTHER; note = N1-methylpseudouracil
  modified_base 113: mod_base = OTHER; note = N1-methylpseudouracil
  modified_base 118: mod_base = OTHER; note = N1-methylpseudouracil
  modified_base 119: mod_base = OTHER; note = N1-methylpseudouracil
  modified_base 120: mod_base = OTHER; note = N1-methylpseudouracil
  modified_base 123: mod_base = OTHER; note = N1-methylpseudouracil
  modified_base 134: mod_base = OTHER; note = N1-methylpseudouracil
  modified_base 135: mod_base = OTHER; note = N1-methylpseudouracil
  modified_base 140: mod_base = OTHER; note = N1-methylpseudouracil
  modified_base 146: mod_base = OTHER; note = N1-methylpseudouracil
  modified_base 147: mod_base = OTHER; note = N1-methylpseudouracil
  modified_base 156: mod_base = OTHER; note = N1-methylpseudouracil
  modified_base 160: mod_base = OTHER; note = N1-methylpseudouracil
  modified_base 162: mod_base = OTHER; note = N1-methylpseudouracil
  modified_base 198: mod_base = OTHER; note = N1-methylpseudouracil
  modified_base 222: mod_base = OTHER; note = N1-methylpseudouracil
  modified_base 225: mod_base = OTHER; note = N1-methylpseudouracil
  modified_base 227: mod_base = OTHER; note = N1-methylpseudouracil
  modified_base 236: mod_base = OTHER; note = N1-methylpseudouracil
  modified_base 240: mod_base = OTHER; note = N1-methylpseudouracil
  modified_base 246: mod_base = OTHER; note = N1-methylpseudouracil
  modified_base 255: mod_base = OTHER; note = N1-methylpseudouracil
  modified_base 258: mod_base = OTHER; note = N1-methylpseudouracil
  modified_base 273: mod_base = OTHER; note = N1-methylpseudouracil
  modified_base 286: mod_base = OTHER; note = N1-methylpseudouracil
  modified_base 292: mod_base = OTHER; note = N1-methylpseudouracil
  modified_base 300: mod_base = OTHER; note = N1-methylpseudouracil
  modified_base 315: mod_base = OTHER; note = N1-methylpseudouracil
  modified_base 317: mod_base = OTHER; note = N1-methylpseudouracil
  modified_base 318: mod_base = OTHER; note = N1-methylpseudouracil
  modified_base 321: mod_base = OTHER; note = N1-methylpseudouracil
  modified_base 324: mod_base = OTHER; note = N1-methylpseudouracil
  modified_base 338: mod_base = OTHER; note = N1-methylpseudouracil
  modified_base 345: mod_base = OTHER; note = N1-methylpseudouracil
  modified_base 347: mod_base = OTHER; note = N1-methylpseudouracil
  modified_base 350: mod_base = OTHER; note = N1-methylpseudouracil
  modified_base 351: mod_base = OTHER; note = N1-methylpseudouracil
  modified_base 360: mod_base = OTHER; note = N1-methylpseudouracil
  modified_base 363: mod_base = OTHER; note = N1-methylpseudouracil
  modified_base 365: mod_base = OTHER; note = N1-methylpseudouracil
  modified_base 372: mod_base = OTHER; note = N1-methylpseudouracil
  modified_base 381: mod_base = OTHER; note = N1-methylpseudouracil
  modified_base 390: mod_base = OTHER; note = N1-methylpseudouracil
  modified_base 392: mod_base = OTHER; note = N1-methylpseudouracil
  modified_base 393: mod_base = OTHER; note = N1-methylpseudouracil
  modified_base 408: mod_base = OTHER; note = N1-methylpseudouracil
  modified_base 426: mod_base = OTHER; note = N1-methylpseudouracil
  modified_base 429: mod_base = OTHER; note = N1-methylpseudouracil
  modified_base 435: mod_base = OTHER; note = N1-methylpseudouracil
  modified_base 438: mod_base = OTHER; note = N1-methylpseudouracil
  modified_base 447: mod_base = OTHER; note = N1-methylpseudouracil
  modified_base 456: mod_base = OTHER; note = N1-methylpseudouracil
  modified_base 462: mod_base = OTHER; note = N1-methylpseudouracil
  modified_base 465: mod_base = OTHER; note = N1-methylpseudouracil
  modified_base 468: mod_base = OTHER; note = N1-methylpseudouracil
  modified_base 474: mod_base = OTHER; note = N1-methylpseudouracil
  modified_base 477: mod_base = OTHER; note = N1-methylpseudouracil
  modified_base 480: mod_base = OTHER; note = N1-methylpseudouracil
  modified_base 488: mod_base = OTHER; note = N1-methylpseudouracil
  modified_base 489: mod_base = OTHER; note = N1-methylpseudouracil
  modified_base 495: mod_base = OTHER; note = N1-methylpseudouracil
  modified_base 498: mod_base = OTHER; note = N1-methylpseudouracil
  modified_base 507: mod_base = OTHER; note = N1-methylpseudouracil
  modified_base 516: mod_base = OTHER; note = N1-methylpseudouracil
  modified_base 521: mod_base = OTHER; note = N1-methylpseudouracil
  modified_base 522: mod_base = OTHER; note = N1-methylpseudouracil
  modified_base 530: mod_base = OTHER; note = N1-methylpseudouracil
  modified_base 531: mod_base = OTHER; note = N1-methylpseudouracil
  modified_base 539: mod_base = OTHER; note = N1-methylpseudouracil
  modified_base 543: mod_base = OTHER; note = N1-methylpseudouracil
  modified_base 550: mod_base = OTHER; note = N1-methylpseudouracil
  modified_base 560: mod_base = OTHER; note = N1-methylpseudouracil
  modified_base 561: mod_base = OTHER; note = N1-methylpseudouracil
  modified_base 570: mod_base = OTHER; note = N1-methylpseudouracil
  modified_base 571: mod_base = OTHER; note = N1-methylpseudouracil
  modified_base 575: mod_base = OTHER; note = N1-methylpseudouracil
  modified_base 576: mod_base = OTHER; note = N1-methylpseudouracil
  modified_base 582: mod_base = OTHER; note = N1-methylpseudouracil
  modified_base 585: mod_base = OTHER; note = N1-methylpseudouracil
  modified_base 592: mod_base = OTHER; note = N1-methylpseudouracil
  modified_base 597: mod_base = OTHER; note = N1-methylpseudouracil
  modified_base 603: mod_base = OTHER; note = N1-methylpseudouracil
  modified_base 606: mod_base = OTHER; note = N1-methylpseudouracil
  modified_base 615: mod_base = OTHER; note = N1-methylpseudouracil
  modified_base 621: mod_base = OTHER; note = N1-methylpseudouracil
  modified_base 625: mod_base = OTHER; note = N1-methylpseudouracil
  modified_base 626: mod_base = OTHER; note = N1-methylpseudouracil
  modified_base 641: mod_base = OTHER; note = N1-methylpseudouracil
  modified_base 653: mod_base = OTHER; note = N1-methylpseudouracil
  modified_base 654: mod_base = OTHER; note = N1-methylpseudouracil
  modified_base 675: mod_base = OTHER; note = N1-methylpseudouracil
  modified_base 678: mod_base = OTHER; note = N1-methylpseudouracil
  modified_base 681: mod_base = OTHER; note = N1-methylpseudouracil
  modified_base 705: mod_base = OTHER; note = N1-methylpseudouracil
  modified_base 707: mod_base = OTHER; note = N1-methylpseudouracil
  modified_base 708: mod_base = OTHER; note = N1-methylpseudouracil
  modified_base 714: mod_base = OTHER; note = N1-methylpseudouracil
  modified_base 717: mod_base = OTHER; note = N1-methylpseudouracil
  modified_base 725: mod_base = OTHER; note = N1-methylpseudouracil
  modified_base 729: mod_base = OTHER; note = N1-methylpseudouracil
  modified_base 742: mod_base = OTHER; note = N1-methylpseudouracil
  modified_base 747: mod_base = OTHER; note = N1-methylpseudouracil
  modified_base 754: mod_base = OTHER; note = N1-methylpseudouracil
  modified_base 761: mod_base = OTHER; note = N1-methylpseudouracil
  modified_base 762: mod_base = OTHER; note = N1-methylpseudouracil
  modified_base 767: mod_base = OTHER; note = N1-methylpseudouracil
  modified_base 768: mod_base = OTHER; note = N1-methylpseudouracil
  modified_base 770: mod_base = OTHER; note = N1-methylpseudouracil
  modified_base 780: mod_base = OTHER; note = N1-methylpseudouracil
  modified_base 781: mod_base = OTHER; note = N1-methylpseudouracil
  modified_base 792: mod_base = OTHER; note = N1-methylpseudouracil
  modified_base 804: mod_base = OTHER; note = N1-methylpseudouracil
  modified_base 815: mod_base = OTHER; note = N1-methylpseudouracil
  modified_base 816: mod_base = OTHER; note = N1-methylpseudouracil
  modified_base 819: mod_base = OTHER; note = N1-methylpseudouracil
  modified_base 825: mod_base = OTHER; note = N1-methylpseudouracil
  modified_base 842: mod_base = OTHER; note = N1-methylpseudouracil
  modified_base 864: mod_base = OTHER; note = N1-methylpseudouracil
  modified_base 872: mod_base = OTHER; note = N1-methylpseudouracil
  modified_base 873: mod_base = OTHER; note = N1-methylpseudouracil
  modified_base 891: mod_base = OTHER; note = N1-methylpseudouracil
  modified_base 894: mod_base = OTHER; note = N1-methylpseudouracil
  modified_base 897: mod_base = OTHER; note = N1-methylpseudouracil
  modified_base 903: mod_base = OTHER; note = N1-methylpseudouracil
  modified_base 905: mod_base = OTHER; note = N1-methylpseudouracil
  modified_base 906: mod_base = OTHER; note = N1-methylpseudouracil
  modified_base 930: mod_base = OTHER; note = N1-methylpseudouracil
  modified_base 933: mod_base = OTHER; note = N1-methylpseudouracil
  modified_base 935: mod_base = OTHER; note = N1-methylpseudouracil
  modified_base 954: mod_base = OTHER; note = N1-methylpseudouracil
  modified_base 959: mod_base = OTHER; note = N1-methylpseudouracil
  modified_base 964: mod_base = OTHER; note = N1-methylpseudouracil
  modified_base 967: mod_base = OTHER; note = N1-methylpseudouracil
  modified_base 968: mod_base = OTHER; note = N1-methylpseudouracil
  modified_base 969: mod_base = OTHER; note = N1-methylpseudouracil
  modified_base 981: mod_base = OTHER; note = N1-methylpseudouracil
  modified_base 984: mod_base = OTHER; note = N1-methylpseudouracil
  modified_base 987: mod_base = OTHER; note = N1-methylpseudouracil
  modified_base 989: mod_base = OTHER; note = N1-methylpseudouracil
  modified_base 992: mod_base = OTHER; note = N1-methylpseudouracil
  modified_base 993: mod_base = OTHER; note = N1-methylpseudouracil
  modified_base 995: mod_base = OTHER; note = N1-methylpseudouracil
  modified_base 1009: mod_base = OTHER; note = N1-methylpseudouracil
  modified_base 1013: mod_base = OTHER; note = N1-methylpseudouracil
  modified_base 1014: mod_base = OTHER; note = N1-methylpseudouracil
  modified_base 1020: mod_base = OTHER; note = N1-methylpseudouracil
  modified_base 1024: mod_base = OTHER; note = N1-methylpseudouracil
  modified_base 1025: mod_base = OTHER; note = N1-methylpseudouracil
  modified_base 1026: mod_base = OTHER; note = N1-methylpseudouracil
  modified_base 1032: mod_base = OTHER; note = N1-methylpseudouracil
  modified_base 1035: mod_base = OTHER; note = N1-methylpseudouracil
  modified_base 1044: mod_base = OTHER; note = N1-methylpseudouracil
  modified_base 1047: mod_base = OTHER; note = N1-methylpseudouracil
  modified_base 1053: mod_base = OTHER; note = N1-methylpseudouracil
  modified_base 1058: mod_base = OTHER; note = N1-methylpseudouracil
  modified_base 1060: mod_base = OTHER; note = N1-methylpseudouracil
  modified_base 1061: mod_base = OTHER; note = N1-methylpseudouracil
  modified_base 1062: mod_base = OTHER; note = N1-methylpseudouracil
  modified_base 1065: mod_base = OTHER; note = N1-methylpseudouracil
  modified_base 1073: mod_base = OTHER; note = N1-methylpseudouracil
  modified_base 1079: mod_base = OTHER; note = N1-methylpseudouracil
  modified_base 1089: mod_base = OTHER; note = N1-methylpseudouracil
  modified_base 1091: mod_base = OTHER; note = N1-methylpseudouracil
  modified_base 1095: mod_base = OTHER; note = N1-methylpseudouracil
  modified_base 1098: mod_base = OTHER; note = N1-methylpseudouracil
  modified_base 1107: mod_base = OTHER; note = N1-methylpseudouracil
  modified_base 1110: mod_base = OTHER; note = N1-methylpseudouracil
  modified_base 1115: mod_base = OTHER; note = N1-methylpseudouracil
  modified_base 1132: mod_base = OTHER; note = N1-methylpseudouracil
  modified_base 1135: mod_base = OTHER; note = N1-methylpseudouracil
  modified_base 1139: mod_base = OTHER; note = N1-methylpseudouracil
  modified_base 1145: mod_base = OTHER; note = N1-methylpseudouracil
  modified_base 1151: mod_base = OTHER; note = N1-methylpseudouracil
  modified_base 1155: mod_base = OTHER; note = N1-methylpseudouracil
  modified_base 1167: mod_base = OTHER; note = N1-methylpseudouracil
  modified_base 1178: mod_base = OTHER; note = N1-methylpseudouracil
  modified_base 1185: mod_base = OTHER; note = N1-methylpseudouracil
  modified_base 1187: mod_base = OTHER; note = N1-methylpseudouracil
  modified_base 1188: mod_base = OTHER; note = N1-methylpseudouracil
  modified_base 1191: mod_base = OTHER; note = N1-methylpseudouracil
  modified_base 1197: mod_base = OTHER; note = N1-methylpseudouracil
  modified_base 1199: mod_base = OTHER; note = N1-methylpseudouracil
  modified_base 1200: mod_base = OTHER; note = N1-methylpseudouracil
  modified_base 1206: mod_base = OTHER; note = N1-methylpseudouracil
  modified_base 1214: mod_base = OTHER; note = N1-methylpseudouracil
  modified_base 1218: mod_base = OTHER; note = N1-methylpseudouracil
  modified_base 1221: mod_base = OTHER; note = N1-methylpseudouracil
  modified_base 1225: mod_base = OTHER; note = N1-methylpseudouracil
  modified_base 1232: mod_base = OTHER; note = N1-methylpseudouracil
  modified_base 1236: mod_base = OTHER; note = N1-methylpseudouracil
  modified_base 1240: mod_base = OTHER; note = N1-methylpseudouracil
  modified_base 1245: mod_base = OTHER; note = N1-methylpseudouracil
  modified_base 1252: mod_base = OTHER; note = N1-methylpseudouracil
  modified_base 1257: mod_base = OTHER; note = N1-methylpseudouracil
  modified_base 1265: mod_base = OTHER; note = N1-methylpseudouracil
  modified_base 1266: mod_base = OTHER; note = N1-methylpseudouracil
  modified_base 1269: mod_base = OTHER; note = N1-methylpseudouracil
  modified_base 1271: mod_base = OTHER; note = N1-methylpseudouracil
  modified_base 1283: mod_base = OTHER; note = N1-methylpseudouracil
  modified_base 1286: mod_base = OTHER; note = N1-methylpseudouracil
  modified_base 1298: mod_base = OTHER; note = N1-methylpseudouracil
  modified_base 1301: mod_base = OTHER; note = N1-methylpseudouracil
  modified_base 1302: mod_base = OTHER; note = N1-methylpseudouracil
  modified_base 1333: mod_base = OTHER; note = N1-methylpseudouracil
  modified_base 1335: mod_base = OTHER; note = N1-methylpseudouracil
  modified_base 1339: mod_base = OTHER; note = N1-methylpseudouracil
  modified_base 1345: mod_base = OTHER; note = N1-methylpseudouracil
  modified_base 1347: mod_base = OTHER; note = N1-methylpseudouracil
  modified_base 1350: mod_base = OTHER; note = N1-methylpseudouracil
  modified_base 1356: mod_base = OTHER; note = N1-methylpseudouracil
  modified_base 1367: mod_base = OTHER; note = N1-methylpseudouracil
  modified_base 1370: mod_base = OTHER; note = N1-methylpseudouracil
  modified_base 1373: mod_base = OTHER; note = N1-methylpseudouracil
  modified_base 1378: mod_base = OTHER; note = N1-methylpseudouracil
  modified_base 1385: mod_base = OTHER; note = N1-methylpseudouracil
  modified_base 1389: mod_base = OTHER; note = N1-methylpseudouracil
  modified_base 1395: mod_base = OTHER; note = N1-methylpseudouracil
  modified_base 1398: mod_base = OTHER; note = N1-methylpseudouracil
  modified_base 1399: mod_base = OTHER; note = N1-methylpseudouracil
  modified_base 1401: mod_base = OTHER; note = N1-methylpseudouracil
  modified_base 1402: mod_base = OTHER; note = N1-methylpseudouracil
  modified_base 1408: mod_base = OTHER; note = N1-methylpseudouracil
  modified_base 1409: mod_base = OTHER; note = N1-methylpseudouracil
  modified_base 1415: mod_base = OTHER; note = N1-methylpseudouracil
  modified_base 1428: mod_base = OTHER; note = N1-methylpseudouracil
  modified_base 1431: mod_base = OTHER; note = N1-methylpseudouracil
  modified_base 1436: mod_base = OTHER; note = N1-methylpseudouracil
  modified_base 1437: mod_base = OTHER; note = N1-methylpseudouracil
  modified_base 1440: mod_base = OTHER; note = N1-methylpseudouracil
  modified_base 1448: mod_base = OTHER; note = N1-methylpseudouracil
  modified_base 1456: mod_base = OTHER; note = N1-methylpseudouracil
  modified_base 1459: mod_base = OTHER; note = N1-methylpseudouracil
  modified_base 1461: mod_base = OTHER; note = N1-methylpseudouracil
  modified_base 1462: mod_base = OTHER; note = N1-methylpseudouracil
  modified_base 1463: mod_base = OTHER; note = N1-methylpseudouracil
  modified_base 1467: mod_base = OTHER; note = N1-methylpseudouracil
  modified_base 1472: mod_base = OTHER; note = N1-methylpseudouracil
  modified_base 1474: mod_base = OTHER; note = N1-methylpseudouracil
  modified_base 1478: mod_base = OTHER; note = N1-methylpseudouracil
ggaaataagagagaaaagaagagtaagaagaaatataagagccaccatgggcagcagcaagagcaagcctaaggaccctagccagagaagaagaggcggcggctcatccggctgccctttcctgggcaacaacttcggctacaccttcaagaagctgcctgtggagggcagcgaggaggacaagagccagaccggcgtgaacagagccagcaagggcggcctgatctacggcaactacctgcacctggagaaggtgctgaacgcccaggagctgcagagcgaaactaagggtaacaagatccacgacgagcacctgttcatcatcacccaccaggcctacgagctgtggttcaagcagatcctgtgggagctggacagcgtgagagagatcttccagaacggccacgtcagggacgagagaaacatgctgaaggtggtgagcagaatgcacagagtgagcgtgatcctgaagctgctggtgcagcagttcagcatcctggaaacaatgaccgccctggacttcaacgacttcagagagtacctgagccctgccagcggcttccagagccttcagttcagactgctggagaataagatcggcgtgctgcagaacatgagagtgccttacaacagaagacactacagagacaacttcaagggcgaggagaacgagctgctgctcaagagcgagcaggagaagaccctcttggaactggtggaggcctggctggagagaacccctggcctggagcctcacggcttcaacttctggggcaagcttgagaagaacatcaccagaggactcgaagaggagttcatcagaatccaggccaaggaggagtcagaggagaaggaggaacaggtggccgagttccagaagcagaaggaagtgctgctaagcctgttcgacgagaagagacacgaacacctgctgtcgaagggagaaagaagactgagctaccgtgctttgcagggcgccctgatgatctacttctacagggaggagcctagattccaggtgcctttccagctgctgaccagcctgatggacatcgactctttgatgaccaagtggagatacaaccacgtgtgcatggtgcacagaatgctcggctccaaggccggcaccggtggtagctccggataccactacctgagaagcaccgtgagcgacagatacaaggtgttcgtggacctcttcaacctcagcacctacctgatccctagacactggatccctaagatgaaccctaccatccacaagttcctgtacaccgccgagtactgcgacagcagctacttcagcagcgacgagagcgacggcggcaagcctatccctaaccctctgctgggcctggacagcacctgataataggctggagcctcggtggccatgcttcttgccccttgggcctccccccagcccctcctccccttcctgcacccgtacccccgtggtctttgaataaagtctgagtgggcggc

SEQ ID NO: 321 - RNA, 1514 nt, synthetic construct
  source 1..1514: mol_type = other RNA
  modified_base 6: mod_base = OTHER; note = N1-methylpseudouracil
  modified_base 14: mod_base = OTHER; note = N1-methylpseudouracil
  modified_base 15: mod_base = OTHER; note = N1-methylpseudouracil
  modified_base 16: mod_base = OTHER; note = N1-methylpseudouracil
  modified_base 19: mod_base = OTHER; note = N1-methylpseudouracil
  modified_base 21: mod_base = OTHER; note = N1-methylpseudouracil
  modified_base 22: mod_base = OTHER; note = N1-methylpseudouracil
  modified_base 27: mod_base = OTHER; note = N1-methylpseudouracil
  modified_base 28: mod_base = OTHER; note = N1-methylpseudouracil
  modified_base 32: mod_base = OTHER; note = N1-methylpseudouracil
  modified_base 33: mod_base = OTHER; note = N1-methylpseudouracil
  modified_base 34: mod_base = OTHER; note = N1-methylpseudouracil
  modified_base 36: mod_base = OTHER; note = N1-methylpseudouracil
  modified_base 37: mod_base = OTHER; note = N1-methylpseudouracil
  modified_base 38: mod_base = OTHER; note = N1-methylpseudouracil
  modified_base 39: mod_base = OTHER; note = N1-methylpseudouracil
  modified_base 42: mod_base = OTHER; note = N1-methylpseudouracil
  modified_base 43: mod_base = OTHER; note = N1-methylpseudouracil
  modified_base 44: mod_base = OTHER; note = N1-methylpseudouracil
  modified_base 45: mod_base = OTHER; note = N1-methylpseudouracil
  modified_base 47: mod_base = OTHER; note = N1-methylpseudouracil
  modified_base 54: mod_base = OTHER; note = N1-methylpseudouracil
  modified_base 62: mod_base = OTHER; note = N1-methylpseudouracil
  modified_base 63: mod_base = OTHER; note = N1-methylpseudouracil
  modified_base 64: mod_base = OTHER; note = N1-methylpseudouracil
  modified_base 65: mod_base = OTHER; note = N1-methylpseudouracil
  modified_base 66: mod_base = OTHER; note = N1-methylpseudouracil
  modified_base 68: mod_base = OTHER; note = N1-methylpseudouracil
  modified_base 69: mod_base = OTHER; note = N1-methylpseudouracil
  modified_base 71: mod_base = OTHER; note = N1-methylpseudouracil
  modified_base 77: mod_base = OTHER; note = N1-methylpseudouracil
  modified_base 99: mod_base = OTHER; note = N1-methylpseudouracil
  modified_base 108: mod_base = OTHER; note = N1-methylpseudouracil
  modified_base 133: mod_base = OTHER; note = N1-methylpseudouracil
  modified_base 136: mod_base = OTHER; note = N1-methylpseudouracil
  modified_base 142: mod_base = OTHER; note = N1-methylpseudouracil
  modified_base 147: mod_base = OTHER; note = N1-methylpseudouracil
  modified_base 148: mod_base = OTHER; note = N1-methylpseudouracil
  modified_base 149: mod_base = OTHER; note = N1-methylpseudouracil
  modified_base 152: mod_base = OTHER; note = N1-methylpseudouracil
  modified_base 163: mod_base = OTHER; note = N1-methylpseudouracil
  modified_base 164: mod_base = OTHER; note = N1-methylpseudouracil
  modified_base 169: mod_base = OTHER; note = N1-methylpseudouracil
  modified_base 175: mod_base = OTHER; note = N1-methylpseudouracil
  modified_base 176: mod_base = OTHER; note = N1-methylpseudouracil
  modified_base 185: mod_base = OTHER; note = N1-methylpseudouracil
  modified_base 189: mod_base = OTHER; note = N1-methylpseudouracil
  modified_base 191: mod_base = OTHER; note = N1-methylpseudouracil
  modified_base 227: mod_base = OTHER; note = N1-methylpseudouracil
  modified_base 251: mod_base = OTHER; note = N1-methylpseudouracil
  modified_base 254: mod_base = OTHER; note = N1-methylpseudouracil
  modified_base 256: mod_base = OTHER; note = N1-methylpseudouracil
  modified_base 265: mod_base = OTHER; note = N1-methylpseudouracil
  modified_base 269: mod_base = OTHER; note = N1-methylpseudouracil
  modified_base 275: mod_base = OTHER; note = N1-methylpseudouracil
  modified_base 284: mod_base = OTHER; note = N1-methylpseudouracil
  modified_base 287: mod_base = OTHER; note = N1-methylpseudouracil
  modified_base 302: mod_base = OTHER; note = N1-methylpseudouracil
  modified_base 315: mod_base = OTHER; note = N1-methylpseudouracil
  modified_base 321: mod_base = OTHER; note = N1-methylpseudouracil
  modified_base 329: mod_base = OTHER; note = N1-methylpseudouracil
  modified_base 344: mod_base = OTHER; note = N1-methylpseudouracil
  modified_base 346: mod_base = OTHER; note = N1-methylpseudouracil
  modified_base 347: mod_base = OTHER; note = N1-methylpseudouracil
  modified_base 350: mod_base = OTHER; note = N1-methylpseudouracil
  modified_base 353: mod_base = OTHER; note = N1-methylpseudouracil
  modified_base 367: mod_base = OTHER; note = N1-methylpseudouracil
  modified_base 374: mod_base = OTHER; note = N1-methylpseudouracil
  modified_base 376: mod_base = OTHER; note = N1-methylpseudouracil
  modified_base 379: mod_base = OTHER; note = N1-methylpseudouracil
  modified_base 380: mod_base = OTHER; note = N1-methylpseudouracil
  modified_base 389: mod_base = OTHER; note = N1-methylpseudouracil
  modified_base 392: mod_base = OTHER; note = N1-methylpseudouracil
  modified_base 394: mod_base = OTHER; note = N1-methylpseudouracil
  modified_base 401: mod_base = OTHER; note = N1-methylpseudouracil
  modified_base 410: mod_base = OTHER; note = N1-methylpseudouracil
  modified_base 419: mod_base = OTHER; note = N1-methylpseudouracil
  modified_base 421: mod_base = OTHER; note = N1-methylpseudouracil
  modified_base 422: mod_base = OTHER; note = N1-methylpseudouracil
  modified_base 437: mod_base = OTHER; note = N1-methylpseudouracil
  modified_base 455: mod_base = OTHER; note = N1-methylpseudouracil
  modified_base 458: mod_base = OTHER; note = N1-methylpseudouracil
  modified_base 464: mod_base = OTHER; note = N1-methylpseudouracil
  modified_base 467: mod_base = OTHER; note = N1-methylpseudouracil
  modified_base 476: mod_base = OTHER; note = N1-methylpseudouracil
  modified_base 485: mod_base = OTHER; note = N1-methylpseudouracil
  modified_base 491: mod_base = OTHER; note = N1-methylpseudouracil
  modified_base 494: mod_base = OTHER; note = N1-methylpseudouracil
  modified_base 497: mod_base = OTHER; note = N1-methylpseudouracil
  modified_base 503: mod_base = OTHER; note = N1-methylpseudouracil
  modified_base 506: mod_base = OTHER; note = N1-methylpseudouracil
  modified_base 509: mod_base = OTHER; note = N1-methylpseudouracil
  modified_base 517: mod_base = OTHER; note = N1-methylpseudouracil
  modified_base 518: mod_base = OTHER; note = N1-methylpseudouracil
  modified_base 524: mod_base = OTHER; note = N1-methylpseudouracil
  modified_base 527: mod_base = OTHER; note = N1-methylpseudouracil
  modified_base 536: mod_base = OTHER; note = N1-methylpseudouracil
  modified_base 545: mod_base = OTHER; note = N1-methylpseudouracil
  modified_base 550: mod_base = OTHER; note = N1-methylpseudouracil
  modified_base 551: mod_base = OTHER; note = N1-methylpseudouracil
  modified_base 559: mod_base = OTHER; note = N1-methylpseudouracil
  modified_base 560: mod_base = OTHER; note = N1-methylpseudouracil
  modified_base 568: mod_base = OTHER; note = N1-methylpseudouracil
  modified_base 572: mod_base = OTHER; note = N1-methylpseudouracil
  modified_base 579: mod_base = OTHER; note = N1-methylpseudouracil
  modified_base 589: mod_base = OTHER; note = N1-methylpseudouracil
  modified_base 590: mod_base = OTHER; note = N1-methylpseudouracil
  modified_base 599: mod_base = OTHER; note = N1-methylpseudouracil
  modified_base 600: mod_base = OTHER; note = N1-methylpseudouracil
  modified_base 604: mod_base = OTHER; note = N1-methylpseudouracil
  modified_base 605: mod_base = OTHER; note = N1-methylpseudouracil
  modified_base 611: mod_base = OTHER; note = N1-methylpseudouracil
  modified_base 614: mod_base = OTHER; note = N1-methylpseudouracil
  modified_base 621: mod_base = OTHER; note = N1-methylpseudouracil
  modified_base 626: mod_base = OTHER; note = N1-methylpseudouracil
  modified_base 632: mod_base = OTHER; note = N1-methylpseudouracil
  modified_base 635: mod_base = OTHER; note = N1-methylpseudouracil
  modified_base 644: mod_base = OTHER; note = N1-methylpseudouracil
  modified_base 650: mod_base = OTHER; note = N1-methylpseudouracil
  modified_base 654: mod_base = OTHER; note = N1-methylpseudouracil
  modified_base 655: mod_base = OTHER; note = N1-methylpseudouracil
  modified_base 670: mod_base = OTHER; note = N1-methylpseudouracil
  modified_base 682: mod_base = OTHER; note = N1-methylpseudouracil
  modified_base 683: mod_base = OTHER; note = N1-methylpseudouracil
  modified_base 704: mod_base = OTHER; note = N1-methylpseudouracil
  modified_base 707: mod_base = OTHER; note = N1-methylpseudouracil
  modified_base 710: mod_base = OTHER; note = N1-methylpseudouracil
  modified_base 734: mod_base = OTHER; note = N1-methylpseudouracil
  modified_base 736: mod_base = OTHER; note = N1-methylpseudouracil
  modified_base 737: mod_base = OTHER; note = N1-methylpseudouracil
  modified_base 743: mod_base = OTHER; note = N1-methylpseudouracil
  modified_base 746: mod_base = OTHER; note = N1-methylpseudouracil
  modified_base 754: mod_base = OTHER; note = N1-methylpseudouracil
  modified_base 758: mod_base = OTHER; note = N1-methylpseudouracil
  modified_base 771: mod_base = OTHER; note = N1-methylpseudouracil
  modified_base 776: mod_base = OTHER; note = N1-methylpseudouracil
  modified_base 783: mod_base = OTHER; note = N1-methylpseudouracil
  modified_base 790: mod_base = OTHER; note = N1-methylpseudouracil
  modified_base 791: mod_base = OTHER; note = N1-methylpseudouracil
  modified_base 796: mod_base = OTHER; note = N1-methylpseudouracil
  modified_base 797: mod_base = OTHER; note = N1-methylpseudouracil
  modified_base 799: mod_base = OTHER; note = N1-methylpseudouracil
  modified_base 809: mod_base = OTHER; note = N1-methylpseudouracil
  modified_base 810: mod_base = OTHER; note = N1-methylpseudouracil
  modified_base 821: mod_base = OTHER; note = N1-methylpseudouracil
  modified_base 833: mod_base = OTHER; note = N1-methylpseudouracil
  modified_base 844: mod_base = OTHER; note = N1-methylpseudouracil
  modified_base 845: mod_base = OTHER; note = N1-methylpseudouracil
  modified_base 848: mod_base = OTHER; note = N1-methylpseudouracil
  modified_base 854: mod_base = OTHER; note = N1-methylpseudouracil
  modified_base 871: mod_base = OTHER; note = N1-methylpseudouracil
  modified_base 893: mod_base = OTHER; note = N1-methylpseudouracil
  modified_base 901: mod_base = OTHER; note = N1-methylpseudouracil
  modified_base 902: mod_base = OTHER; note = N1-methylpseudouracil
  modified_base 920: mod_base = OTHER; note = N1-methylpseudouracil
  modified_base 923: mod_base = OTHER; note = N1-methylpseudouracil
  modified_base 926: mod_base = OTHER; note = N1-methylpseudouracil
  modified_base 932: mod_base = OTHER; note = N1-methylpseudouracil
  modified_base 934: mod_base = OTHER; note = N1-methylpseudouracil
  modified_base 935: mod_base = OTHER; note = N1-methylpseudouracil
  modified_base 959: mod_base = OTHER; note = N1-methylpseudouracil
  modified_base 962: mod_base = OTHER; note = N1-methylpseudouracil
  modified_base 964: mod_base = OTHER; note = N1-methylpseudouracil
  modified_base 983: mod_base = OTHER; note = N1-methylpseudouracil
  modified_base 988: mod_base = OTHER; note = N1-methylpseudouracil
  modified_base 993: mod_base = OTHER; note = N1-methylpseudouracil
  modified_base 996: mod_base = OTHER; note = N1-methylpseudouracil
  modified_base 997: mod_base = OTHER; note = N1-methylpseudouracil
  modified_base 998: mod_base = OTHER; note = N1-methylpseudouracil
  modified_base 1010: mod_base = OTHER; note = N1-methylpseudouracil
  modified_base 1013: mod_base = OTHER; note = N1-methylpseudouracil
  modified_base 1016: mod_base = OTHER; note = N1-methylpseudouracil
  modified_base 1018: mod_base = OTHER; note = N1-methylpseudouracil
  modified_base 1021: mod_base = OTHER; note = N1-methylpseudouracil
  modified_base 1022: mod_base = OTHER; note = N1-methylpseudouracil
  modified_base 1024: mod_base = OTHER; note = N1-methylpseudouracil
  modified_base 1038: mod_base = OTHER; note = N1-methylpseudouracil
  modified_base 1042: mod_base = OTHER; note = N1-methylpseudouracil
  modified_base 1043: mod_base = OTHER; note = N1-methylpseudouracil
  modified_base 1049: mod_base = OTHER; note = N1-methylpseudouracil
  modified_base 1053: mod_base = OTHER; note = N1-methylpseudouracil
  modified_base 1054: mod_base = OTHER; note = N1-methylpseudouracil
  modified_base 1055: mod_base = OTHER; note = N1-methylpseudouracil
  modified_base 1061: mod_base = OTHER; note = N1-methylpseudouracil
  modified_base 1064: mod_base = OTHER; note = N1-methylpseudouracil
  modified_base 1073: mod_base = OTHER; note = N1-methylpseudouracil
  modified_base 1076: mod_base = OTHER; note = N1-methylpseudouracil
  modified_base 1082: mod_base = OTHER; note = N1-methylpseudouracil
  modified_base 1087: mod_base = OTHER; note = N1-methylpseudouracil
  modified_base 1089: mod_base = OTHER; note = N1-methylpseudouracil
  modified_base 1090: mod_base = OTHER; note = N1-methylpseudouracil
  modified_base 1091: mod_base = OTHER; note = N1-methylpseudouracil
  modified_base 1094: mod_base = OTHER; note = N1-methylpseudouracil
  modified_base 1102: mod_base = OTHER; note = N1-methylpseudouracil
  modified_base 1108: mod_base = OTHER; note = N1-methylpseudouracil
  modified_base 1118: mod_base = OTHER; note = N1-methylpseudouracil
  modified_base 1120: mod_base = OTHER; note = N1-methylpseudouracil
  modified_base 1124: mod_base = OTHER; note = N1-methylpseudouracil
  modified_base 1127: mod_base = OTHER; note = N1-methylpseudouracil
  modified_base 1136: mod_base = OTHER; note = N1-methylpseudouracil
  modified_base 1139: mod_base = OTHER; note = N1-methylpseudouracil
  modified_base 1144: mod_base = OTHER; note = N1-methylpseudouracil
  modified_base 1161: mod_base = OTHER; note = N1-methylpseudouracil
  modified_base 1164: mod_base = OTHER; note = N1-methylpseudouracil
  modified_base 1168: mod_base = OTHER; note = N1-methylpseudouracil
  modified_base 1174: mod_base = OTHER; note = N1-methylpseudouracil
  modified_base 1180: mod_base = OTHER; note = N1-methylpseudouracil
  modified_base 1184: mod_base = OTHER; note = N1-methylpseudouracil
  modified_base 1196: mod_base = OTHER; note = N1-methylpseudouracil
  modified_base 1207: mod_base = OTHER; note = N1-methylpseudouracil
  modified_base 1214: mod_base = OTHER; note = N1-methylpseudouracil
  modified_base 1216: mod_base = OTHER; note = N1-methylpseudouracil
  modified_base 1217: mod_base = OTHER; note = N1-methylpseudouracil
  modified_base 1220: mod_base = OTHER; note = N1-methylpseudouracil
  modified_base 1226: mod_base = OTHER; note = N1-methylpseudouracil
  modified_base 1228: mod_base = OTHER; note = N1-methylpseudouracil
  modified_base 1229: mod_base = OTHER; note = N1-methylpseudouracil
  modified_base 1235: mod_base = OTHER; note = N1-methylpseudouracil
  modified_base 1243: mod_base = OTHER; note = N1-methylpseudouracil
  modified_base 1247: mod_base = OTHER; note = N1-methylpseudouracil
  modified_base 1250: mod_base = OTHER; note = N1-methylpseudouracil
  modified_base 1254: mod_base = OTHER; note = N1-methylpseudouracil
  modified_base 1261: mod_base = OTHER; note = N1-methylpseudouracil
  modified_base 1265: mod_base = OTHER; note = N1-methylpseudouracil
  modified_base 1269: mod_base = OTHER; note = N1-methylpseudouracil
  modified_base 1274: mod_base = OTHER; note = N1-methylpseudouracil
  modified_base 1281: mod_base = OTHER; note = N1-methylpseudouracil
  modified_base 1286: mod_base = OTHER; note = N1-methylpseudouracil
  modified_base 1294: mod_base = OTHER; note = N1-methylpseudouracil
  modified_base 1295: mod_base = OTHER; note = N1-methylpseudouracil
  modified_base 1298: mod_base = OTHER; note = N1-methylpseudouracil
  modified_base 1300: mod_base = OTHER; note = N1-methylpseudouracil
  modified_base 1312: mod_base = OTHER; note = N1-methylpseudouracil
  modified_base 1315: mod_base = OTHER; note = N1-methylpseudouracil
  modified_base 1327: mod_base = OTHER; note = N1-methylpseudouracil
  modified_base 1330: mod_base = OTHER; note = N1-methylpseudouracil
  modified_base 1331: mod_base = OTHER; note = N1-methylpseudouracil
  modified_base 1362: mod_base = OTHER; note = N1-methylpseudouracil
  modified_base 1364: mod_base = OTHER; note = N1-methylpseudouracil
  modified_base 1368: mod_base = OTHER; note = N1-methylpseudouracil
  modified_base 1374: mod_base = OTHER; note = N1-methylpseudouracil
  modified_base 1376: mod_base = OTHER; note = N1-methylpseudouracil
  modified_base 1379: mod_base = OTHER; note = N1-methylpseudouracil
  modified_base 1385: mod_base = OTHER; note = N1-methylpseudouracil
  modified_base 1396: mod_base = OTHER; note = N1-methylpseudouracil
  modified_base 1399: mod_base = OTHER; note = N1-methylpseudouracil
  modified_base 1402: mod_base = OTHER; note = N1-methylpseudouracil
  modified_base 1407: mod_base = OTHER; note = N1-methylpseudouracil
  modified_base 1414: mod_base = OTHER; note = N1-methylpseudouracil
  modified_base 1418: mod_base = OTHER; note = N1-methylpseudouracil
  modified_base 1423: mod_base = OTHER; note = N1-methylpseudouracil
  modified_base 1427: mod_base = OTHER; note = N1-methylpseudouracil
  modified_base 1428: mod_base = OTHER; note = N1-methylpseudouracil
  modified_base 1430: mod_base = OTHER; note = N1-methylpseudouracil
  modified_base 1431: mod_base = OTHER; note = N1-methylpseudouracil
  modified_base 1437: mod_base = OTHER; note = N1-methylpseudouracil
  modified_base 1438: mod_base = OTHER; note = N1-methylpseudouracil
  modified_base 1444: mod_base = OTHER; note = N1-methylpseudouracil
  modified_base 1457: mod_base = OTHER; note = N1-methylpseudouracil
  modified_base 1460: mod_base = OTHER; note = N1-methylpseudouracil
  modified_base 1465: mod_base = OTHER; note = N1-methylpseudouracil
  modified_base 1466: mod_base = OTHER; note = N1-methylpseudouracil
  modified_base 1469: mod_base = OTHER; note = N1-methylpseudouracil
  modified_base 1477: mod_base = OTHER; note = N1-methylpseudouracil
  modified_base 1485: mod_base = OTHER; note = N1-methylpseudouracil
  modified_base 1488: mod_base = OTHER; note = N1-methylpseudouracil
  modified_base 1490: mod_base = OTHER; note = N1-methylpseudouracil
  modified_base 1491: mod_base = OTHER; note = N1-methylpseudouracil
  modified_base 1492: mod_base = OTHER; note = N1-methylpseudouracil
  modified_base 1496: mod_base = OTHER; note = N1-methylpseudouracil
  modified_base 1501: mod_base = OTHER; note = N1-methylpseudouracil
  modified_base 1503: mod_base = OTHER; note = N1-methylpseudouracil
  modified_base 1507: mod_base = OTHER; note = N1-methylpseudouracil
ggaaatcgcaaaatttgctcttcgcgttagatttcttttagttttctcgcaactagcaagctttttgttctcgccatgggcagcagcaagagcaagcctaaggaccctagccagagaagaagaggcggcggctcatccggctgccctttcctgggcaacaacttcggctacaccttcaagaagctgcctgtggagggcagcgaggaggacaagagccagaccggcgtgaacagagccagcaagggcggcctgatctacggcaactacctgcacctggagaaggtgctgaacgcccaggagctgcagagcgaaactaagggtaacaagatccacgacgagcacctgttcatcatcacccaccaggcctacgagctgtggttcaagcagatcctgtgggagctggacagcgtgagagagatcttccagaacggccacgtcagggacgagagaaacatgctgaaggtggtgagcagaatgcacagagtgagcgtgatcctgaagctgctggtgcagcagttcagcatcctggaaacaatgaccgccctggacttcaacgacttcagagagtacctgagccctgccagcggcttccagagccttcagttcagactgctggagaataagatcggcgtgctgcagaacatgagagtgccttacaacagaagacactacagagacaacttcaagggcgaggagaacgagctgctgctcaagagcgagcaggagaagaccctcttggaactggtggaggcctggctggagagaacccctggcctggagcctcacggcttcaacttctggggcaagcttgagaagaacatcaccagaggactcgaagaggagttcatcagaatccaggccaaggaggagtcagaggagaaggaggaacaggtggccgagttccagaagcagaaggaagtgctgctaagcctgttcgacgagaagagacacgaacacctgctgtcgaagggagaaagaagactgagctaccgtgctttgcagggcgccctgatgatctacttctacagggaggagcctagattccaggtgcctttccagctgctgaccagcctgatggacatcgactctttgatgaccaagtggagatacaaccacgtgtgcatggtgcacagaatgctcggctccaaggccggcaccggtggtagctccggataccactacctgagaagcaccgtgagcgacagatacaaggtgttcgtggacctcttcaacctcagcacctacctgatccctagacactggatccctaagatgaaccctaccatccacaagttcctgtacaccgccgagtactgcgacagcagctacttcagcagcgacgagagcgacggcggcaagcctatccctaaccctctgctgggcctggacagcacctgataataggctggagcctcggtggcctagcttcttgccccttgggcctccccccagcccctcctccccttcctgcacccgtacccccgtggtctttgaataaagtctgagtgggcggc

SEQ ID NO: 322 - RNA, 1514 nt, synthetic construct
  source 1..1514: mol_type = other RNA
  modified_base 6: mod_base = OTHER; note = N1-methylpseudouracil
  modified_base 14: mod_base = OTHER; note = N1-methylpseudouracil
  modified_base 15: mod_base = OTHER; note = N1-methylpseudouracil
  modified_base 16: mod_base = OTHER; note = N1-methylpseudouracil
  modified_base 19: mod_base = OTHER; note = N1-methylpseudouracil
  modified_base 21: mod_base = OTHER; note = N1-methylpseudouracil
  modified_base 22: mod_base = OTHER; note = N1-methylpseudouracil
  modified_base 27: mod_base = OTHER; note = N1-methylpseudouracil
  modified_base 28: mod_base = OTHER; note = N1-methylpseudouracil
  modified_base 32: mod_base = OTHER; note = N1-methylpseudouracil
  modified_base 33: mod_base = OTHER; note = N1-methylpseudouracil
  modified_base 34: mod_base = OTHER; note = N1-methylpseudouracil
  modified_base 36: mod_base = OTHER; note = N1-methylpseudouracil
  modified_base 37: mod_base = OTHER; note = N1-methylpseudouracil
  modified_base 38: mod_base = OTHER; note = N1-methylpseudouracil
  modified_base 39: mod_base = OTHER; note = N1-methylpseudouracil
  modified_base 42: mod_base = OTHER; note = N1-methylpseudouracil
  modified_base 43: mod_base = OTHER; note = N1-methylpseudouracil
  modified_base 44: mod_base = OTHER; note = N1-methylpseudouracil
  modified_base 45: mod_base = OTHER; note = N1-methylpseudouracil
  modified_base 47: mod_base = OTHER; note = N1-methylpseudouracil
  modified_base 54: mod_base = OTHER; note = N1-methylpseudouracil
  modified_base 62: mod_base = OTHER; note = N1-methylpseudouracil
  modified_base 63: mod_base = OTHER; note = N1-methylpseudouracil
  modified_base 64: mod_base = OTHER; note = N1-methylpseudouracil
  modified_base 65: mod_base = OTHER; note = N1-methylpseudouracil
  modified_base 66: mod_base = OTHER; note = N1-methylpseudouracil
  modified_base 68: mod_base = OTHER; note = N1-methylpseudouracil
  modified_base 69: mod_base = OTHER; note = N1-methylpseudouracil
  modified_base 71: mod_base = OTHER; note = N1-methylpseudouracil
  modified_base 77: mod_base = OTHER; note = N1-methylpseudouracil
  modified_base 99: mod_base = OTHER; note = N1-methylpseudouracil
  modified_base 108: mod_base = OTHER; note = N1-methylpseudouracil
  modified_base 133: mod_base = OTHER; note = N1-methylpseudouracil
  modified_base 136: mod_base = OTHER; note = N1-methylpseudouracil
  modified_base 142: mod_base = OTHER; note = N1-methylpseudouracil
  modified_base 147: mod_base = OTHER; note = N1-methylpseudouracil
  modified_base 148: mod_base = OTHER; note = N1-methylpseudouracil
  modified_base 149: mod_base = OTHER; note = N1-methylpseudouracil
  modified_base 152: mod_base = OTHER; note = N1-methylpseudouracil
  modified_base 163: mod_base = OTHER; note = N1-methylpseudouracil
  modified_base 164: mod_base = OTHER; note = N1-methylpseudouracil
  modified_base 169: mod_base = OTHER; note = N1-methylpseudouracil
  modified_base 175: mod_base = OTHER; note = N1-methylpseudouracil
  modified_base 176: mod_base = OTHER; note = N1-methylpseudouracil
  modified_base 185: mod_base = OTHER; note = N1-methylpseudouracil
  modified_base 189: mod_base = OTHER; note = N1-methylpseudouracil
  modified_base 191: mod_base = OTHER; note = N1-methylpseudouracil
  modified_base 227: mod_base = OTHER; note = N1-methylpseudouracil
  modified_base 251: mod_base = OTHER; note = N1-methylpseudouracil
  modified_base 254: mod_base = OTHER; note = N1-methylpseudouracil
  modified_base 256: mod_base = OTHER; note = N1-methylpseudouracil
  modified_base 265: mod_base = OTHER; note = N1-methylpseudouracil
  modified_base 269: mod_base = OTHER; note = N1-methylpseudouracil
  modified_base 275: mod_base = OTHER; note = N1-methylpseudouracil
  modified_base 284: mod_base = OTHER; note = N1-methylpseudouracil
  modified_base 287: mod_base = OTHER; note = N1-methylpseudouracil
  modified_base 302: mod_base = OTHER; note = N1-methylpseudouracil
  modified_base 315: mod_base = OTHER; note = N1-methylpseudouracil
  modified_base 321: mod_base = OTHER; note = N1-methylpseudouracil
  modified_base 329: mod_base = OTHER; note = N1-methylpseudouracil
  modified_base 344: mod_base = OTHER; note = N1-methylpseudouracil
  modified_base 346: mod_base = OTHER; note = N1-methylpseudouracil
  modified_base 347: mod_base = OTHER; note = N1-methylpseudouracil
  modified_base 350: mod_base = OTHER; note = N1-methylpseudouracil
  modified_base 353: mod_base = OTHER; note = N1-methylpseudouracil
  modified_base 367: mod_base = OTHER; note = N1-methylpseudouracil
  modified_base 374: mod_base = OTHER; note = N1-methylpseudouracil
  modified_base 376: mod_base = OTHER; note = N1-methylpseudouracil
  modified_base 379: mod_base = OTHER; note = N1-methylpseudouracil
  modified_base 380: mod_base = OTHER; note = N1-methylpseudouracil
  modified_base 389: mod_base = OTHER; note = N1-methylpseudouracil
  modified_base 392: mod_base = OTHER; note = N1-methylpseudouracil
  modified_base 394: mod_base = OTHER; note = N1-methylpseudouracil
  modified_base 401: mod_base = OTHER; note = N1-methylpseudouracil
  modified_base 410: mod_base = OTHER; note = N1-methylpseudouracil
  modified_base 419: mod_base = OTHER; note = N1-methylpseudouracil
  modified_base 421: mod_base = OTHER; note = N1-methylpseudouracil
  modified_base 422: mod_base = OTHER; note = N1-methylpseudouracil
  modified_base 437: mod_base = OTHER; note = N1-methylpseudouracil
  modified_base 455: mod_base = OTHER; note = N1-methylpseudouracil
  modified_base 458: mod_base = OTHER; note = N1-methylpseudouracil
  modified_base 464: mod_base = OTHER; note = N1-methylpseudouracil
  modified_base 467: mod_base = OTHER; note = N1-methylpseudouracil
  modified_base 476: mod_base = OTHER; note = N1-methylpseudouracil
  modified_base 485: mod_base = OTHER; note = N1-methylpseudouracil
  modified_base 491: mod_base = OTHER; note = N1-methylpseudouracil
  modified_base 494: mod_base = OTHER; note = N1-methylpseudouracil
  modified_base 497: mod_base = OTHER; note = N1-methylpseudouracil
  modified_base 503: mod_base = OTHER; note = N1-methylpseudouracil
  modified_base 506: mod_base = OTHER; note = N1-methylpseudouracil
  modified_base 509: mod_base = OTHER; note = N1-methylpseudouracil
  modified_base 517: mod_base = OTHER; note = N1-methylpseudouracil
  modified_base 518: mod_base = OTHER; note = N1-methylpseudouracil
  modified_base 524: mod_base = OTHER; note = N1-methylpseudouracil
  modified_base 527: mod_base = OTHER; note = N1-methylpseudouracil
  modified_base 536: mod_base = OTHER; note = N1-methylpseudouracil
  modified_base 545: mod_base = OTHER; note = N1-methylpseudouracil
  modified_base 550: mod_base = OTHER; note = N1-methylpseudouracil
  modified_base 551: mod_base = OTHER; note = N1-methylpseudouracil
  modified_base 559: mod_base = OTHER; note = N1-methylpseudouracil
  modified_base 560: mod_base = OTHER; note = N1-methylpseudouracil
  modified_base 568: mod_base = OTHER; note = N1-methylpseudouracil
  modified_base 572: mod_base = OTHER; note = N1-methylpseudouracil
  modified_base 579: mod_base = OTHER; note = N1-methylpseudouracil
  modified_base 589: mod_base = OTHER; note = N1-methylpseudouracil
  modified_base 590: mod_base = OTHER; note = N1-methylpseudouracil
  modified_base 599: mod_base = OTHER; note = N1-methylpseudouracil
  modified_base 600: mod_base = OTHER; note = N1-methylpseudouracil
  modified_base 604: mod_base = OTHER; note = N1-methylpseudouracil
  modified_base 605: mod_base = OTHER; note = N1-methylpseudouracil
  modified_base 611: mod_base = OTHER; note = N1-methylpseudouracil
  modified_base 614: mod_base = OTHER; note = N1-methylpseudouracil
  modified_base 621: mod_base = OTHER; note = N1-methylpseudouracil
  modified_base 626: mod_base = OTHER; note = N1-methylpseudouracil
  modified_base 632: mod_base = OTHER; note = N1-methylpseudouracil
  modified_base 635: mod_base = OTHER; note = N1-methylpseudouracil
  modified_base 644: mod_base = OTHER; note = N1-methylpseudouracil
  modified_base 650: mod_base = OTHER; note = N1-methylpseudouracil
  modified_base 654: mod_base = OTHER; note = N1-methylpseudouracil
  modified_base 655: mod_base = OTHER; note = N1-methylpseudouracil
  modified_base 670: mod_base = OTHER; note = N1-methylpseudouracil
  modified_base 682: mod_base = OTHER; note = N1-methylpseudouracil
  modified_base 683: mod_base = OTHER; note = N1-methylpseudouracil
  modified_base 704: mod_base = OTHER; note = N1-methylpseudouracil
  modified_base 707: mod_base = OTHER; note = N1-methylpseudouracil
  modified_base 710: mod_base = OTHER; note = N1-methylpseudouracil
  modified_base 734: mod_base = OTHER; note = N1-methylpseudouracil
  modified_base 736: mod_base = OTHER; note = N1-methylpseudouracil
  modified_base 737: mod_base = OTHER; note = N1-methylpseudouracil
  modified_base 743: mod_base = OTHER; note = N1-methylpseudouracil
  modified_base 746: mod_base = OTHER; note = N1-methylpseudouracil
  modified_base 754: mod_base = OTHER; note = N1-methylpseudouracil
  modified_base 758: mod_base = OTHER; note = N1-methylpseudouracil
  modified_base 771: mod_base = OTHER; note = N1-methylpseudouracil
  modified_base 776: mod_base = OTHER; note = N1-methylpseudouracil
  modified_base 783: mod_base = OTHER; note = N1-methylpseudouracil
  modified_base 790: mod_base = OTHER; note = N1-methylpseudouracil
  modified_base 791: mod_base = OTHER; note = N1-methylpseudouracil
  modified_base 796: mod_base = OTHER; note = N1-methylpseudouracil
  modified_base 797: mod_base = OTHER; note = N1-methylpseudouracil
  modified_base 799: mod_base = OTHER; note = N1-methylpseudouracil
  modified_base 809: mod_base = OTHER; note = N1-methylpseudouracil
  modified_base 810: mod_base = OTHER; note = N1-methylpseudouracil
  modified_base 821: mod_base = OTHER; note = N1-methylpseudouracil
  modified_base 833: mod_base = OTHER; note = N1-methylpseudouracil
  modified_base 844: mod_base = OTHER; note = N1-methylpseudouracil
  modified_base 845: mod_base = OTHER; note = N1-methylpseudouracil
  modified_base 848: mod_base = OTHER; note = N1-methylpseudouracil
  modified_base 854: mod_base = OTHER; note = N1-methylpseudouracil
  modified_base 871: mod_base = OTHER; note = N1-methylpseudouracil
  modified_base 893: mod_base = OTHER; note = N1-methylpseudouracil
  modified_base 901: mod_base = OTHER; note = N1-methylpseudouracil
  modified_base 902: mod_base = OTHER; note = N1-methylpseudouracil
  modified_base 920: mod_base = OTHER; note = N1-methylpseudouracil
  modified_base 923: mod_base = OTHER; note = N1-methylpseudouracil
  modified_base 926: mod_base = OTHER; note = N1-methylpseudouracil
  modified_base 932: mod_base = OTHER; note = N1-methylpseudouracil
  modified_base 934: mod_base = OTHER; note = N1-methylpseudouracil
  modified_base 935: mod_base = OTHER; note = N1-methylpseudouracil
  modified_base 959: mod_base = OTHER; note = N1-methylpseudouracil
  modified_base 962: mod_base = OTHER; note = N1-methylpseudouracil
  modified_base 964: mod_base = OTHER; note = N1-methylpseudouracil
  modified_base 983: mod_base = OTHER; note = N1-methylpseudouracil
  modified_base 988: mod_base = OTHER; note = N1-methylpseudouracil
  modified_base 993: mod_base = OTHER; note = N1-methylpseudouracil
  modified_base 996: mod_base = OTHER; note = N1-methylpseudouracil
  modified_base 997: mod_base = OTHER; note = N1-methylpseudouracil
  modified_base 998: mod_base = OTHER; note = N1-methylpseudouracil
  modified_base 1010: mod_base = OTHER; note = N1-methylpseudouracil
  modified_base 1013: mod_base = OTHER; note = N1-methylpseudouracil
  modified_base 1016: mod_base = OTHER; note = N1-methylpseudouracil
  modified_base 1018: mod_base = OTHER; note = N1-methylpseudouracil
  modified_base 1021: mod_base = OTHER; note = N1-methylpseudouracil
  modified_base 1022: mod_base = OTHER; note = N1-methylpseudouracil
  modified_base 1024: mod_base = OTHER; note = N1-methylpseudouracil
  modified_base 1038: mod_base = OTHER; note = N1-methylpseudouracil
  modified_base 1042: mod_base = OTHER; note = N1-methylpseudouracil
  modified_base 1043: mod_base = OTHER; note = N1-methylpseudouracil
  modified_base 1049: mod_base = OTHER; note = N1-methylpseudouracil
  modified_base 1053: mod_base = OTHER; note = N1-methylpseudouracil
  modified_base 1054: mod_base = OTHER; note = N1-methylpseudouracil
  modified_base 1055: mod_base = OTHER; note = N1-methylpseudouracil
  modified_base 1061: mod_base = OTHER; note = N1-methylpseudouracil
  modified_base 1064: mod_base = OTHER; note = N1-methylpseudouracil
  modified_base 1073: mod_base = OTHER; note = N1-methylpseudouracil
  modified_base 1076: mod_base = OTHER; note = N1-methylpseudouracil
  modified_base 1082: mod_base = OTHER; note = N1-methylpseudouracil
  modified_base 1087: mod_base = OTHER; note = N1-methylpseudouracil
  modified_base 1089: mod_base = OTHER; note = N1-methylpseudouracil
  modified_base 1090: mod_base = OTHER; note = N1-methylpseudouracil
  modified_base 1091: mod_base = OTHER; note = N1-methylpseudouracil
  modified_base 1094: mod_base = OTHER; note = N1-methylpseudouracil
  modified_base 1102: mod_base = OTHER; note = N1-methylpseudouracil
  modified_base 1108: mod_base = OTHER; note = N1-methylpseudouracil
  modified_base 1118: mod_base = OTHER; note = N1-methylpseudouracil
  modified_base 1120: mod_base = OTHER; note = N1-methylpseudouracil
  modified_base 1124: mod_base = OTHER; note = N1-methylpseudouracil
  modified_base 1127: mod_base = OTHER; note = N1-methylpseudouracil
  modified_base 1136: mod_base = OTHER; note = N1-methylpseudouracil
  modified_base 1139: mod_base = OTHER; note = N1-methylpseudouracil
  modified_base 1144: mod_base = OTHER; note = N1-methylpseudouracil
  modified_base 1161: mod_base = OTHER; note = N1-methylpseudouracil
  modified_base 1164: mod_base = OTHER; note = N1-methylpseudouracil
  modified_base 1168: mod_base = OTHER; note = N1-methylpseudouracil
  modified_base 1174: mod_base = OTHER; note = N1-methylpseudouracil
  modified_base 1180: mod_base = OTHER; note = N1-methylpseudouracil
  modified_base 1184: mod_base = OTHER; note = N1-methylpseudouracil
  modified_base 1196: mod_base = OTHER; note = N1-methylpseudouracil
  modified_base 1207: mod_base = OTHER; note = N1-methylpseudouracil
  modified_base 1214: mod_base = OTHER; note = N1-methylpseudouracil
  modified_base 1216: mod_base = OTHER; note = N1-methylpseudouracil
  modified_base 1217: mod_base = OTHER; note = N1-methylpseudouracil
  modified_base 1220: mod_base = OTHER; note = N1-methylpseudouracil
  modified_base 1226: mod_base = OTHER; note = N1-methylpseudouracil
  modified_base 1228: mod_base = OTHER; note = N1-methylpseudouracil
  modified_base 1229: mod_base = OTHER; note = N1-methylpseudouracil
  modified_base 1235: mod_base = OTHER; note = N1-methylpseudouracil
  modified_base 1243: mod_base = OTHER; note = N1-methylpseudouracil
  modified_base 1247: mod_base = OTHER; note = N1-methylpseudouracil
  modified_base 1250: mod_base = OTHER; note = N1-methylpseudouracil
  modified_base 1254: mod_base = OTHER; note = N1-methylpseudouracil
  modified_base 1261: mod_base = OTHER; note = N1-methylpseudouracil
  modified_base 1265: mod_base = OTHER; note = N1-methylpseudouracil
  modified_base 1269: mod_base = OTHER; note = N1-methylpseudouracil
  modified_base 1274: mod_base = OTHER; note = N1-methylpseudouracil
  modified_base 1281: mod_base = OTHER; note = N1-methylpseudouracil
  modified_base 1286: mod_base = OTHER; note = N1-methylpseudouracil
  modified_base 1294: mod_base = OTHER; note = N1-methylpseudouracil
  modified_base 1295: mod_base = OTHER; note = N1-methylpseudouracil
  modified_base 1298: mod_base = OTHER; note = N1-methylpseudouracil
  modified_base 1300: mod_base = OTHER; note = N1-methylpseudouracil
  modified_base 1312: mod_base = OTHER; note = N1-methylpseudouracil
  modified_base 1315: mod_base = OTHER; note = N1-methylpseudouracil
  modified_base 1327: mod_base = OTHER; note = N1-methylpseudouracil
  modified_base 1330: mod_base = OTHER; note = N1-methylpseudouracil
  modified_base 1331: mod_base = OTHER; note = N1-methylpseudouracil
  modified_base 1362: mod_base = OTHER; note = N1-methylpseudouracil
  modified_base 1364: mod_base = OTHER; note = N1-methylpseudouracil
  modified_base 1368: mod_base = OTHER; note = N1-methylpseudouracil
  modified_base 1374: mod_base = OTHER; note = N1-methylpseudouracil
  modified_base 1376: mod_base = OTHER; note = N1-methylpseudouracil
  modified_base 1379: mod_base = OTHER; note = N1-methylpseudouracil
  modified_base 1385: mod_base = OTHER; note = N1-methylpseudouracil
  modified_base 1396: mod_base = OTHER; note = N1-methylpseudouracil
  modified_base 1400: mod_base = OTHER; note = N1-methylpseudouracil
  modified_base 1402: mod_base = OTHER; note = N1-methylpseudouracil
  modified_base 1407: mod_base = OTHER; note = N1-methylpseudouracil
  modified_base 1414: mod_base = OTHER; note = N1-methylpseudouracil
  modified_base 1418: mod_base = OTHER; note = N1-methylpseudouracil
  modified_base 1423: mod_base = OTHER; note = N1-methylpseudouracil
  modified_base 1427: mod_base = OTHER; note = N1-methylpseudouracil
  modified_base 1428: mod_base = OTHER; note = N1-methylpseudouracil
  modified_base 1430: mod_base = OTHER; note = N1-methylpseudouracil
  modified_base 1431: mod_base = OTHER; note = N1-methylpseudouracil
  modified_base 1437: mod_base = OTHER; note = N1-methylpseudouracil
  modified_base 1438: mod_base = OTHER; note = N1-methylpseudouracil
  modified_base 1444: mod_base = OTHER; note = N1-methylpseudouracil
  modified_base 1457: mod_base = OTHER; note = N1-methylpseudouracil
  modified_base 1460: mod_base = OTHER; note = N1-methylpseudouracil
  modified_base 1465: mod_base = OTHER; note = N1-methylpseudouracil
  modified_base 1466: mod_base = OTHER; note = N1-methylpseudouracil
  modified_base 1469: mod_base = OTHER; note = N1-methylpseudouracil
  modified_base 1477: mod_base = OTHER; note = N1-methylpseudouracil
  modified_base 1485: mod_base = OTHER; note = N1-methylpseudouracil
  modified_base 1488: mod_base = OTHER; note = N1-methylpseudouracil
  modified_base 1490: mod_base = OTHER; note = N1-methylpseudouracil
  modified_base 1491: mod_base = OTHER; note = N1-methylpseudouracil
  modified_base 1492: mod_base = OTHER; note = N1-methylpseudouracil
  modified_base 1496: mod_base = OTHER; note = N1-methylpseudouracil
  modified_base 1501: mod_base = OTHER; note = N1-methylpseudouracil
  modified_base 1503: mod_base = OTHER; note = N1-methylpseudouracil
  modified_base 1507: mod_base = OTHER; note = N1-methylpseudouracil
ggaaatcgcaaaatttgctcttcgcgttagatttcttttagttttctcgcaactagcaagctttttgttctcgccatgggcagcagcaagagcaagcctaaggaccctagccagagaagaagaggcggcggctcatccggctgccctttcctgggcaacaacttcggctacaccttcaagaagctgcctgtggagggcagcgaggaggacaagagccagaccggcgtgaacagagccagcaagggcggcctgatctacggcaactacctgcacctggagaaggtgctgaacgcccaggagctgcagagcgaaactaagggtaacaagatccacgacgagcacctgttcatcatcacccaccaggcctacgagctgtggttcaagcagatcctgtgggagctggacagcgtgagagagatcttccagaacggccacgtcagggacgagagaaacatgctgaaggtggtgagcagaatgcacagagtgagcgtgatcctgaagctgctggtgcagcagttcagcatcctggaaacaatgaccgccctggacttcaacgacttcagagagtacctgagccctgccagcggcttccagagccttcagttcagactgctggagaataagatcggcgtgctgcagaacatgagagtgccttacaacagaagacactacagagacaacttcaagggcgaggagaacgagctgctgctcaagagcgagcaggagaagaccctcttggaactggtggaggcctggctggagagaacccctggcctggagcctcacggcttcaacttctggggcaagcttgagaagaacatcaccagaggactcgaagaggagttcatcagaatccaggccaaggaggagtcagaggagaaggaggaacaggtggccgagttccagaagcagaaggaagtgctgctaagcctgttcgacgagaagagacacgaacacctgctgtcgaagggagaaagaagactgagctaccgtgctttgcagggcgccctgatgatctacttctacagggaggagcctagattccaggtgcctttccagctgctgaccagcctgatggacatcgactctttgatgaccaagtggagatacaaccacgtgtgcatggtgcacagaatgctcggctccaaggccggcaccggtggtagctccggataccactacctgagaagcaccgtgagcgacagatacaaggtgttcgtggacctcttcaacctcagcacctacctgatccctagacactggatccctaagatgaaccctaccatccacaagttcctgtacaccgccgagtactgcgacagcagctacttcagcagcgacgagagcgacggcggcaagcctatccctaaccctctgctgggcctggacagcacctaagtctccgctggagcctcggtggcctagcttcttgccccttgggcctccccccagcccctcctccccttcctgcacccgtacccccgtggtctttgaataaagtctgagtgggcggc

SEQ ID NO: 323 - RNA, 1514 nt, synthetic construct
  source 1..1514: mol_type = other RNA
  modified_base 6: mod_base = OTHER; note = N1-methylpseudouracil
  modified_base 14: mod_base = OTHER; note = N1-methylpseudouracil
  modified_base 15: mod_base = OTHER; note = N1-methylpseudouracil
  modified_base 16: mod_base = OTHER; note = N1-methylpseudouracil
  modified_base 19: mod_base = OTHER; note = N1-methylpseudouracil
  modified_base 21: mod_base = OTHER; note = N1-methylpseudouracil
  modified_base 22: mod_base = OTHER; note = N1-methylpseudouracil
  modified_base 27: mod_base = OTHER; note = N1-methylpseudouracil
  modified_base 28: mod_base = OTHER; note = N1-methylpseudouracil
  modified_base 32: mod_base = OTHER; note = N1-methylpseudouracil
  modified_base 33: mod_base = OTHER; note = N1-methylpseudouracil
  modified_base 34: mod_base = OTHER; note = N1-methylpseudouracil
  modified_base 36: mod_base = OTHER; note = N1-methylpseudouracil
  modified_base 37: mod_base = OTHER; note = N1-methylpseudouracil
  modified_base 38: mod_base = OTHER; note = N1-methylpseudouracil
  modified_base 39: mod_base = OTHER; note = N1-methylpseudouracil
  modified_base 42: mod_base = OTHER; note = N1-methylpseudouracil
  modified_base 43: mod_base = OTHER; note = N1-methylpseudouracil
  modified_base 44: mod_base = OTHER; note = N1-methylpseudouracil
  modified_base 45: mod_base = OTHER; note = N1-methylpseudouracil
  modified_base 47: mod_base = OTHER; note = N1-methylpseudouracil
  modified_base 54: mod_base = OTHER; note = N1-methylpseudouracil
  modified_base 62: mod_base = OTHER; note = N1-methylpseudouracil
  modified_base 63: mod_base = OTHER; note = N1-methylpseudouracil
  modified_base 64: mod_base = OTHER; note = N1-methylpseudouracil
  modified_base 65: mod_base = OTHER; note = N1-methylpseudouracil
  modified_base 66: mod_base = OTHER; note = N1-methylpseudouracil
  modified_base 68: mod_base = OTHER; note = N1-methylpseudouracil
  modified_base 69: mod_base = OTHER; note = N1-methylpseudouracil
  modified_base 71: mod_base = OTHER; note = N1-methylpseudouracil
  modified_base 77: mod_base = OTHER; note = N1-methylpseudouracil
  modified_base 91: mod_base = OTHER; note = N1-methylpseudouracil
  modified_base 108: mod_base = OTHER; note = N1-methylpseudouracil
  modified_base 109: mod_base = OTHER; note = N1-methylpseudouracil
  modified_base 126: mod_base = OTHER; note = N1-methylpseudouracil
  modified_base 133: mod_base = OTHER; note = N1-methylpseudouracil
  modified_base 135: mod_base = OTHER; note = N1-methylpseudouracil
  modified_base 142: mod_base = OTHER; note = N1-methylpseudouracil
  modified_base 148: mod_base = OTHER; note = N1-methylpseudouracil
  modified_base 149: mod_base = OTHER; note = N1-methylpseudouracil
  modified_base 152: mod_base = OTHER; note = N1-methylpseudouracil
  modified_base 163: mod_base = OTHER; note = N1-methylpseudouracil
  modified_base 164: mod_base = OTHER; note = N1-methylpseudouracil
  modified_base 169: mod_base = OTHER; note = N1-methylpseudouracil
  modified_base 175: mod_base = OTHER; note = N1-methylpseudouracil
  modified_base 176: mod_base = OTHER; note = N1-methylpseudouracil
  modified_base 185: mod_base = OTHER; note = N1-methylpseudouracil
  modified_base 191: mod_base = OTHER; note = N1-methylpseudouracil
  modified_base 214: mod_base = OTHER; note = N1-methylpseudouracil
  modified_base 227: mod_base = OTHER; note = N1-methylpseudouracil
  modified_base 246: mod_base = OTHER; note = N1-methylpseudouracil
  modified_base 251: mod_base = OTHER; note = N1-methylpseudouracil
  modified_base 254: mod_base = OTHER; note = N1-methylpseudouracil
  modified_base 256: mod_base = OTHER; note = N1-methylpseudouracil
  modified_base 265: mod_base = OTHER; note = N1-methylpseudouracil
  modified_base 269: mod_base = OTHER; note = N1-methylpseudouracil
  modified_base 275: mod_base = OTHER; note = N1-methylpseudouracil
  modified_base 284: mod_base = OTHER; note = N1-methylpseudouracil
  modified_base 287: mod_base = OTHER; note = N1-methylpseudouracil
  modified_base 302: mod_base = OTHER; note = N1-methylpseudouracil
  modified_base 307: mod_base = OTHER; note = N1-methylpseudouracil
  modified_base 324: mod_base = OTHER; note = N1-methylpseudouracil
  modified_base 329: mod_base = OTHER; note = N1-methylpseudouracil
  modified_base 344: mod_base = OTHER; note = N1-methylpseudouracil
  modified_base 346: mod_base = OTHER; note = N1-methylpseudouracil
  modified_base 347: mod_base = OTHER; note = N1-methylpseudouracil
  modified_base 350: mod_base = OTHER; note = N1-methylpseudouracil
  modified_base 353: mod_base = OTHER; note = N1-methylpseudouracil
  modified_base 367: mod_base = OTHER; note = N1-methylpseudouracil
  modified_base 374: mod_base = OTHER; note = N1-methylpseudouracil
  modified_base 376: mod_base = OTHER; note = N1-methylpseudouracil
  modified_base 379: mod_base = OTHER; note = N1-methylpseudouracil
  modified_base 380: mod_base = OTHER; note = N1-methylpseudouracil
  modified_base 389: mod_base = OTHER; note = N1-methylpseudouracil
  modified_base 392: mod_base = OTHER; note = N1-methylpseudouracil
  modified_base 394: mod_base = OTHER; note = N1-methylpseudouracil
  modified_base 401: mod_base = OTHER; note = N1-methylpseudouracil
  modified_base 405: mod_base = OTHER; note = N1-methylpseudouracil
  modified_base 410: mod_base = OTHER; note = N1-methylpseudouracil
  modified_base 419: mod_base = OTHER; note = N1-methylpseudouracil
  modified_base 421: mod_base = OTHER; note = N1-methylpseudouracil
  modified_base 422: mod_base = OTHER; note = N1-methylpseudouracil
  modified_base 437: mod_base = OTHER; note = N1-methylpseudouracil
  modified_base 455: mod_base = OTHER; note = N1-methylpseudouracil
  modified_base 458: mod_base = OTHER; note = N1-methylpseudouracil
  modified_base 464: mod_base = OTHER; note = N1-methylpseudouracil
  modified_base 467: mod_base = OTHER; note = N1-methylpseudouracil
  modified_base 476: mod_base = OTHER; note = N1-methylpseudouracil
  modified_base 485: mod_base = OTHER; note = N1-methylpseudouracil
  modified_base 487: mod_base = OTHER; note = N1-methylpseudouracil
  modified_base 491: mod_base = OTHER; note = N1-methylpseudouracil
  modified_base 494: mod_base = OTHER; note = N1-methylpseudouracil
  modified_base 497: mod_base = OTHER; note = N1-methylpseudouracil
  modified_base 503: mod_base = OTHER; note = N1-methylpseudouracil
  modified_base 506: mod_base = OTHER; note = N1-methylpseudouracil
  modified_base 509: mod_base = OTHER; note = N1-methylpseudouracil
  modified_base 517: mod_base = OTHER; note = N1-methylpseudouracil
  modified_base 518: mod_base = OTHER; note = N1-methylpseudouracil
  modified_base 522: mod_base = OTHER; note = N1-methylpseudouracil
  modified_base 524: mod_base = OTHER; note = N1-methylpseudouracil
  modified_base 527: mod_base = OTHER; note = N1-methylpseudouracil
  modified_base 536: mod_base = OTHER; note = N1-methylpseudouracil
  modified_base 545: mod_base = OTHER; note = N1-methylpseudouracil
  modified_base 550: mod_base = OTHER; note = N1-methylpseudouracil
  modified_base 551: mod_base = OTHER; note = N1-methylpseudouracil
  modified_base 559: mod_base = OTHER; note = N1-methylpseudouracil
  modified_base 560: mod_base = OTHER; note = N1-methylpseudouracil
  modified_base 568: mod_base = OTHER; note = N1-methylpseudouracil
  modified_base 572: mod_base = OTHER; note = N1-methylpseudouracil
  modified_base 583: mod_base = OTHER; note = N1-methylpseudouracil
  modified_base 589: mod_base = OTHER; note = N1-methylpseudouracil
  modified_base 590: mod_base = OTHER; note = N1-methylpseudouracil
  modified_base 595: mod_base = OTHER; note = N1-methylpseudouracil
  modified_base 599: mod_base = OTHER; note = N1-methylpseudouracil
  modified_base 604: mod_base = OTHER; note = N1-methylpseudouracil
  modified_base 605: mod_base = OTHER; note = N1-methylpseudouracil
  modified_base 611: mod_base = OTHER; note = N1-methylpseudouracil
  modified_base 614: mod_base = OTHER; note = N1-methylpseudouracil
  modified_base 626: mod_base = OTHER; note = N1-methylpseudouracil
  modified_base 632: mod_base = OTHER; note = N1-methylpseudouracil
  modified_base 635: mod_base = OTHER; note = N1-methylpseudouracil
  modified_base 644: mod_base = OTHER; note = N1-methylpseudouracil
  modified_base 650: mod_base = OTHER; note = N1-methylpseudouracil
  modified_base 654: mod_base = OTHER; note = N1-methylpseudouracil
  modified_base 655: mod_base = OTHER; note = N1-methylpseudouracil
  modified_base 670: mod_base = OTHER; note = N1-methylpseudouracil
  modified_base 682: mod_base = OTHER; note = N1-methylpseudouracil
  modified_base 683: mod_base = OTHER; note = N1-methylpseudouracil
  modified_base 704: mod_base = OTHER; note = N1-methylpseudouracil
  modified_base 707: mod_base = OTHER; note = N1-methylpseudouracil
  modified_base 710: mod_base = OTHER; note = N1-methylpseudouracil
  modified_base 715: mod_base = OTHER; note = N1-methylpseudouracil
  modified_base 734: mod_base = OTHER; note = N1-methylpseudouracil
  modified_base 737: mod_base = OTHER; note = N1-methylpseudouracil
  modified_base 743: mod_base = OTHER; note = N1-methylpseudouracil
  modified_base 746: mod_base = OTHER; note = N1-methylpseudouracil
  modified_base 754: mod_base = OTHER; note = N1-methylpseudouracil
  modified_base 758: mod_base = OTHER; note = N1-methylpseudouracil
  modified_base 776: mod_base = OTHER; note = N1-methylpseudouracil
  modified_base 790: mod_base = OTHER; note = N1-methylpseudouracil
  modified_base 791: mod_base = OTHER; note = N1-methylpseudouracil
  modified_base 796: mod_base = OTHER; note = N1-methylpseudouracil
  modified_base 797: mod_base = OTHER; note = N1-methylpseudouracil
  modified_base 799: mod_base = OTHER; note = N1-methylpseudouracil
  modified_base 809: mod_base = OTHER; note = N1-methylpseudouracil
  modified_base 821: mod_base = OTHER; note = N1-methylpseudouracil
  modified_base 833: mod_base = OTHER; note = N1-methylpseudouracil
  modified_base 844: mod_base = OTHER; note = N1-methylpseudouracil
  modified_base 845: mod_base = OTHER; note = N1-methylpseudouracil
  modified_base 848: mod_base = OTHER; note = N1-methylpseudouracil
  modified_base 854: mod_base = OTHER; note = N1-methylpseudouracil
  modified_base 871: mod_base = OTHER; note = N1-methylpseudouracil
  modified_base 893: mod_base = OTHER; note = N1-methylpseudouracil
  modified_base 901: mod_base = OTHER; note = N1-methylpseudouracil
  modified_base 902: mod_base = OTHER; note = N1-methylpseudouracil
  modified_base 920: mod_base = OTHER; note = N1-methylpseudouracil
  modified_base 923: mod_base = OTHER; note = N1-methylpseudouracil
  modified_base 926: mod_base = OTHER; note = N1-methylpseudouracil
  modified_base 932: mod_base = OTHER; note = N1-methylpseudouracil
  modified_base 934: mod_base = OTHER; note = N1-methylpseudouracil
  modified_base 935: mod_base = OTHER; note = N1-methylpseudouracil
  modified_base 959: mod_base = OTHER; note = N1-methylpseudouracil
  modified_base 962: mod_base = OTHER; note = N1-methylpseudouracil
  modified_base 964: mod_base = OTHER; note = N1-methylpseudouracil
  modified_base 983: mod_base = OTHER; note = N1-methylpseudouracil
  modified_base 988: mod_base = OTHER; note = N1-methylpseudouracil
  modified_base 998: mod_base = OTHER; note = N1-methylpseudouracil
  modified_base 1010: mod_base = OTHER; note = N1-methylpseudouracil
  modified_base 1013: mod_base = OTHER; note = N1-methylpseudouracil
  modified_base 1016: mod_base = OTHER; note = N1-methylpseudouracil
  modified_base 1018: mod_base = OTHER; note = N1-methylpseudouracil
  modified_base 1021: mod_base = OTHER; note = N1-methylpseudouracil
  modified_base 1022: mod_base = OTHER; note = N1-methylpseudouracil
  modified_base 1024: mod_base = OTHER; note = N1-methylpseudouracil
  modified_base 1042: mod_base = OTHER; note = N1-methylpseudouracil
  modified_base 1043: mod_base = OTHER; note = N1-methylpseudouracil
  modified_base 1049: mod_base = OTHER; note = N1-methylpseudouracil
  modified_base 1054: mod_base = OTHER; note = N1-methylpseudouracil
  modified_base 1055: mod_base = OTHER; note = N1-methylpseudouracil
  modified_base 1061: mod_base = OTHER; note = N1-methylpseudouracil
  modified_base 1064: mod_base = OTHER; note = N1-methylpseudouracil
  modified_base 1073: mod_base = OTHER; note = N1-methylpseudouracil
  modified_base 1076: mod_base = OTHER; note = N1-methylpseudouracil
  modified_base 1082: mod_base = OTHER; note = N1-methylpseudouracil
  modified_base 1091: mod_base = OTHER; note = N1-methylpseudouracil
  modified_base 1094: mod_base = OTHER; note = N1-methylpseudouracil
  modified_base 1102: mod_base = OTHER; note = N1-methylpseudouracil
  modified_base 1108: mod_base = OTHER; note = N1-methylpseudouracil
  modified_base 1118: mod_base = OTHER; note = N1-methylpseudouracil
  modified_base 1120: mod_base = OTHER; note = N1-methylpseudouracil
  modified_base 1124: mod_base = OTHER; note = N1-methylpseudouracil
  modified_base 1127: mod_base = OTHER; note = N1-methylpseudouracil
  modified_base 1136: mod_base = OTHER; note = N1-methylpseudouracil
  modified_base 1139: mod_base = OTHER; note = N1-methylpseudouracil
  modified_base 1144: mod_base = OTHER; note = N1-methylpseudouracil
  modified_base 1167: mod_base = OTHER; note = N1-methylpseudouracil
  modified_base 1168: mod_base = OTHER; note = N1-methylpseudouracil
  modified_base 1174: mod_base = OTHER; note = N1-methylpseudouracil
  modified_base 1180: mod_base = OTHER; note = N1-methylpseudouracil
  modified_base 1184: mod_base = OTHER; note = N1-methylpseudouracil
  modified_base 1196: mod_base = OTHER; note = N1-methylpseudouracil
  modified_base 1198: mod_base = OTHER; note = N1-methylpseudouracil
  modified_base 1207: mod_base = OTHER; note = N1-methylpseudouracil
  modified_base 1214: mod_base = OTHER; note = N1-methylpseudouracil
  modified_base 1216: mod_base = OTHER; note = N1-methylpseudouracil
  modified_base 1217: mod_base = OTHER; note = N1-methylpseudouracil
  modified_base 1220: mod_base = OTHER; note = N1-methylpseudouracil
  modified_base 1226: mod_base = OTHER; note = N1-methylpseudouracil
  modified_base 1228: mod_base = OTHER; note = N1-methylpseudouracil
  modified_base 1229: mod_base = OTHER; note = N1-methylpseudouracil
  modified_base 1235: mod_base = OTHER; note = N1-methylpseudouracil
  modified_base 1243: mod_base = OTHER; note = N1-methylpseudouracil
  modified_base 1247: mod_base = OTHER; note = N1-methylpseudouracil
  modified_base 1250: mod_base = OTHER; note = N1-methylpseudouracil
  modified_base 1254: mod_base = OTHER; note = N1-methylpseudouracil
  modified_base 1261: mod_base = OTHER; note = N1-methylpseudouracil
  modified_base 1265: mod_base = OTHER; note = N1-methylpseudouracil
  modified_base 1269: mod_base = OTHER; note = N1-methylpseudouracil
  modified_base 1274: mod_base = OTHER; note = N1-methylpseudouracil
  modified_base 1286: mod_base = OTHER; note = N1-methylpseudouracil
  modified_base 1294: mod_base = OTHER; note = N1-methylpseudouracil
  modified_base 1295: mod_base = OTHER; note = N1-methylpseudouracil
  modified_base 1298: mod_base = OTHER; note = N1-methylpseudouracil
  modified_base 1300: mod_base = OTHER; note = N1-methylpseudouracil
  modified_base 1312: mod_base = OTHER; note = N1-methylpseudouracil
  modified_base 1315: mod_base = OTHER; note = N1-methylpseudouracil
  modified_base 1327: mod_base = OTHER; note = N1-methylpseudouracil
  modified_base 1330: mod_base = OTHER; note = N1-methylpseudouracil
  modified_base 1331: mod_base = OTHER; note = N1-methylpseudouracil
  modified_base 1333: mod_base = OTHER; note = N1-methylpseudouracil
  modified_base 1336: mod_base = OTHER; note = N1-methylpseudouracil
  modified_base 1345: mod_base = OTHER; note = N1-methylpseudouracil
  modified_base 1364: mod_base = OTHER; note = N1-methylpseudouracil
  modified_base 1371: mod_base = OTHER; note = N1-methylpseudouracil
  modified_base 1376: mod_base = OTHER; note = N1-methylpseudouracil
  modified_base 1379: mod_base = OTHER; note = N1-methylpseudouracil
  modified_base 1385: mod_base = OTHER; note = N1-methylpseudouracil
  modified_base 1390: mod_base = OTHER; note = N1-methylpseudouracil
  modified_base 1396: mod_base = OTHER; note = N1-methylpseudouracil
  modified_base 1399: mod_base = OTHER; note = N1-methylpseudouracil
  modified_base 1402: mod_base = OTHER; note = N1-methylpseudouracil
  modified_base 1407: mod_base = OTHER; note = N1-methylpseudouracil
  modified_base 1414: mod_base = OTHER; note = N1-methylpseudouracil
  modified_base 1418: mod_base = OTHER; note = N1-methylpseudouracil
  modified_base 1423: mod_base = OTHER; note = N1-methylpseudouracil
  modified_base 1427: mod_base = OTHER; note = N1-methylpseudouracil
  modified_base 1428: mod_base = OTHER; note = N1-methylpseudouracil
  modified_base 1430: mod_base = OTHER; note = N1-methylpseudouracil
  modified_base 1431: mod_base = OTHER; note = N1-methylpseudouracil
  modified_base 1437: mod_base = OTHER; note = N1-methylpseudouracil
  modified_base 1438: mod_base = OTHER; note = N1-methylpseudouracil
  modified_base 1444: mod_base = OTHER; note = N1-methylpseudouracil
  modified_base 1457: mod_base = OTHER; note = N1-methylpseudouracil
  modified_base 1460: mod_base = OTHER; note = N1-methylpseudouracil
  modified_base 1465: mod_base = OTHER; note = N1-methylpseudouracil
  modified_base 1466: mod_base = OTHER; note = N1-methylpseudouracil
  modified_base 1469: mod_base = OTHER; note = N1-methylpseudouracil
  modified_base 1477: mod_base = OTHER; note = N1-methylpseudouracil
  modified_base 1485: mod_base = OTHER; note = N1-methylpseudouracil
  modified_base 1488: mod_base = OTHER; note = N1-methylpseudouracil
  modified_base 1490: mod_base = OTHER; note = N1-methylpseudouracil
  modified_base 1491: mod_base = OTHER; note = N1-methylpseudouracil
  modified_base 1492: mod_base = OTHER; note = N1-methylpseudouracil
  modified_base 1496: mod_base = OTHER; note = N1-methylpseudouracil
  modified_base 1501: mod_base = OTHER; note = N1-methylpseudouracil
  modified_base 1503: mod_base = OTHER; note = N1-methylpseudouracil
  modified_base 1507: mod_base = OTHER; note = N1-methylpseudouracil
ggaaatcgcaaaatttgctcttcgcgttagatttcttttagttttctcgcaactagcaagctttttgttctcgccatgggcagcagcaagtccaagcccaaggacccttcccagagaaggaggggtggcggctctagcggctgccccttcctgggcaacaacttcggctacaccttcaagaagctgcccgtggagggcagcgaggaggacaagtcccagaccggcgtgaaccgggccagcaagggtggcctgatctacggcaactacctgcacctggagaaggtgctgaacgcccaggagctgcagtccgagaccaagggcaataagatccacgacgagcacctgttcatcatcacccaccaggcctacgagctgtggttcaagcagatcctgtgggagctggatagcgtgagggagatcttccagaacggccacgtgcgggacgagcgcaacatgctgaaggtggtgagccggatgcaccgggtgtccgtgatcctgaagctgctggtgcagcagttcagtatcctggagaccatgaccgccctggacttcaacgacttccgggagtacctgagcccagcctccgggttccagtccctgcagttcagactgctggagaacaagatcggggtgctgcagaacatgcgggtgccttacaaccggcggcactaccgggacaacttcaagggcgaggagaacgagctgctgctgaagtccgagcaggagaagaccctgctggagctggtggaggcctggctggagcggacacccgggctggagccacacgggttcaacttctggggcaagctggagaagaacatcaccagaggcctggaggaggagttcatccgcatccaggccaaggaagagtccgaggagaaggaggagcaggtggccgagttccagaagcagaaggaggtgctgctgagcctgttcgacgagaagaggcacgagcacctgctgtccaagggcgagaggcggctgagctacagagccctacagggcgccctgatgatctacttctacagggaggagccccgcttccaggtgcccttccagctgctgaccagcctgatggacatcgacagcctgatgaccaagtggcggtacaaccacgtgtgcatggtgcaccggatgctgggctccaaagccggaacgggcggcagttccggctaccactacctgcggagcaccgtgtccgaccggtacaaggtgttcgtggacctgttcaacctgagcacctacctgatccctcggcactggatccctaagatgaaccccaccatccacaagttcctgtacaccgccgagtactgcgacagcagctacttctcctccgacgagtccgacggcggaaagcccatccccaatcccctgctgggcctggactccacctgataataggctggagcctcggtggcctagcttcttgccccttgggcctccccccagcccctcctccccttcctgcacccgtacccccgtggtctttgaataaagtctgagtgggcggc

SEQ ID NO: 324 - RNA, 1514 nt, synthetic construct
  source 1..1514: mol_type = other RNA
  modified_base 6: mod_base = OTHER; note = N1-methylpseudouracil
  modified_base 14: mod_base = OTHER; note = N1-methylpseudouracil
  modified_base 15: mod_base = OTHER; note = N1-methylpseudouracil
  modified_base 16: mod_base = OTHER; note = N1-methylpseudouracil
  modified_base 19: mod_base = OTHER; note = N1-methylpseudouracil
  modified_base 21: mod_base = OTHER; note = N1-methylpseudouracil
  modified_base 22: mod_base = OTHER; note = N1-methylpseudouracil
  modified_base 27: mod_base = OTHER; note = N1-methylpseudouracil
  modified_base 28: mod_base = OTHER; note = N1-methylpseudouracil
  modified_base 32: mod_base = OTHER; note = N1-methylpseudouracil
  modified_base 33: mod_base = OTHER; note = N1-methylpseudouracil
  modified_base 34: mod_base = OTHER; note = N1-methylpseudouracil
  modified_base 36: mod_base = OTHER; note = N1-methylpseudouracil
  modified_base 37: mod_base = OTHER; note = N1-methylpseudouracil
  modified_base 38: mod_base = OTHER; note = N1-methylpseudouracil
  modified_base 39: mod_base = OTHER; note = N1-methylpseudouracil
  modified_base 42: mod_base = OTHER; note = N1-methylpseudouracil
  modified_base 43: mod_base = OTHER; note = N1-methylpseudouracil
  modified_base 44: mod_base = OTHER; note = N1-methylpseudouracil
  modified_base 45: mod_base = OTHER; note = N1-methylpseudouracil
  modified_base 47: mod_base = OTHER; note = N1-methylpseudouracil
  modified_base 54: mod_base = OTHER; note = N1-methylpseudouracil
  modified_base 62: mod_base = OTHER; note = N1-methylpseudouracil
  modified_base 63: mod_base = OTHER; note = N1-methylpseudouracil
  modified_base 64: mod_base = OTHER; note = N1-methylpseudouracil
  modified_base 65: mod_base = OTHER; note = N1-methylpseudouracil
  modified_base 66: mod_base = OTHER; note = N1-methylpseudouracil
  modified_base 68: mod_base = OTHER; note = N1-methylpseudouracil
  modified_base 69: mod_base = OTHER; note = N1-methylpseudouracil
  modified_base 71: mod_base = OTHER; note = N1-methylpseudouracil
  modified_base 77: mod_base = OTHER; note = N1-methylpseudouracil
  modified_base 91: mod_base = OTHER; note = N1-methylpseudouracil
  modified_base 108: mod_base = OTHER; note = N1-methylpseudouracil
  modified_base 109: mod_base = OTHER; note = N1-methylpseudouracil
  modified_base 126: mod_base = OTHER; note = N1-methylpseudouracil
  modified_base 133: mod_base = OTHER; note = N1-methylpseudouracil
  modified_base 135: mod_base = OTHER; note = N1-methylpseudouracil
  modified_base 142: mod_base = OTHER; note = N1-methylpseudouracil
  modified_base 148: mod_base = OTHER; note = N1-methylpseudouracil
  modified_base 149: mod_base = OTHER; note = N1-methylpseudouracil
  modified_base 152: mod_base = OTHER; note = N1-methylpseudouracil
  modified_base 163: mod_base = OTHER; note = N1-methylpseudouracil
  modified_base 164: mod_base = OTHER; note = N1-methylpseudouracil
  modified_base 169: mod_base = OTHER; note = N1-methylpseudouracil
  modified_base 175: mod_base = OTHER; note = N1-methylpseudouracil
  modified_base 176: mod_base = OTHER; note = N1-methylpseudouracil
  modified_base 185: mod_base = OTHER; note = N1-methylpseudouracil
  modified_base 191: mod_base = OTHER; note = N1-methylpseudouracil
  modified_base 214: mod_base = OTHER; note = N1-methylpseudouracil
  modified_base 227: mod_base = OTHER; note = N1-methylpseudouracil
  modified_base 246: mod_base = OTHER; note = N1-methylpseudouracil
  modified_base 251: mod_base = OTHER; note = N1-methylpseudouracil
  modified_base 254: mod_base = OTHER; note = N1-methylpseudouracil
  modified_base 256: mod_base = OTHER; note = N1-methylpseudouracil
  modified_base 265: mod_base = OTHER; note = N1-methylpseudouracil
  modified_base 269: mod_base = OTHER; note = N1-methylpseudouracil
  modified_base 275: mod_base = OTHER; note = N1-methylpseudouracil
  modified_base 284: mod_base = OTHER; note = N1-methylpseudouracil
  modified_base 287: mod_base = OTHER; note = N1-methylpseudouracil
  modified_base 302: mod_base = OTHER; note = N1-methylpseudouracil
  modified_base 307: mod_base = OTHER; note = N1-methylpseudouracil
  modified_base 324: mod_base = OTHER; note = N1-methylpseudouracil
  modified_base 329: mod_base = OTHER; note = N1-methylpseudouracil
  modified_base 344: mod_base = OTHER; note = N1-methylpseudouracil
  modified_base 346: mod_base = OTHER; note = N1-methylpseudouracil
  modified_base 347: mod_base = OTHER; note = N1-methylpseudouracil
  modified_base 350: mod_base = OTHER; note = N1-methylpseudouracil
  modified_base 353: mod_base = OTHER; note = N1-methylpseudouracil
  modified_base 367: mod_base = OTHER; note = N1-methylpseudouracil
  modified_base 374: mod_base = OTHER; note = N1-methylpseudouracil
  modified_base 376: mod_base = OTHER; note = N1-methylpseudouracil
  modified_base 379: mod_base = OTHER; note = N1-methylpseudouracil
  modified_base 380: mod_base = OTHER; note = N1-methylpseudouracil
  modified_base 389: mod_base = OTHER; note = N1-methylpseudouracil
  modified_base 392: mod_base = OTHER; note = N1-methylpseudouracil
  modified_base 394: mod_base = OTHER; note = N1-methylpseudouracil
  modified_base 401: mod_base = OTHER; note = N1-methylpseudouracil
  modified_base 405: mod_base = OTHER; note = N1-methylpseudouracil
  modified_base 410: mod_base = OTHER; note = N1-methylpseudouracil
  modified_base 419: mod_base = OTHER; note = N1-methylpseudouracil
  modified_base 421: mod_base = OTHER; note = N1-methylpseudouracil
  modified_base 422: mod_base = OTHER; note = N1-methylpseudouracil
  modified_base 437: mod_base = OTHER; note = N1-methylpseudouracil
  modified_base 455: mod_base = OTHER; note = N1-methylpseudouracil
  modified_base 458: mod_base = OTHER; note = N1-methylpseudouracil
  modified_base 464: mod_base = OTHER; note = N1-methylpseudouracil
  modified_base 467: mod_base = OTHER; note = N1-methylpseudouracil
  modified_base 476: mod_base = OTHER; note = N1-methylpseudouracil
  modified_base 485: mod_base = OTHER; note = N1-methylpseudouracil
  modified_base 487: mod_base = OTHER; note = N1-methylpseudouracil
  modified_base 491: mod_base = OTHER; note = N1-methylpseudouracil
  modified_base 494: mod_base = OTHER; note = N1-methylpseudouracil
  modified_base 497: mod_base = OTHER; note = N1-methylpseudouracil
  modified_base 503: mod_base = OTHER; note = N1-methylpseudouracil
  modified_base 506: mod_base = OTHER; note = N1-methylpseudouracil
  modified_base 509: mod_base = OTHER; note = N1-methylpseudouracil
  modified_base 517: mod_base = OTHER; note = N1-methylpseudouracil
  modified_base 518: mod_base = OTHER; note = N1-methylpseudouracil
  modified_base 522: mod_base = OTHER; note = N1-methylpseudouracil
  modified_base 524: mod_base = OTHER; note = N1-methylpseudouracil
  modified_base 527: mod_base = OTHER; note = N1-methylpseudouracil
  modified_base 536: mod_base = OTHER; note = N1-methylpseudouracil
  modified_base 545: mod_base = OTHER; note = N1-methylpseudouracil
  modified_base 550: mod_base = OTHER; note = N1-methylpseudouracil
  modified_base 551: mod_base = OTHER; note = N1-methylpseudouracil
  modified_base 559: mod_base = OTHER; note = N1-methylpseudouracil
  modified_base 560: mod_base = OTHER; note = N1-methylpseudouracil
  modified_base 568: mod_base = OTHER; note = N1-methylpseudouracil
  modified_base 572: mod_base = OTHER; note = N1-methylpseudouracil
  modified_base 583: mod_base = OTHER; note = N1-methylpseudouracil
  modified_base 589: mod_base = OTHER; note = N1-methylpseudouracil
  modified_base 590: mod_base = OTHER; note = N1-methylpseudouracil
  modified_base 595: mod_base = OTHER; note = N1-methylpseudouracil
  modified_base 599: mod_base = OTHER; note = N1-methylpseudouracil
  modified_base 604: mod_base = OTHER; note = N1-methylpseudouracil
  modified_base 605: mod_base = OTHER; note = N1-methylpseudouracil
  modified_base 611: mod_base = OTHER; note = N1-methylpseudouracil
  modified_base 614: mod_base = OTHER; note = N1-methylpseudouracil
  modified_base 626: mod_base = OTHER; note = N1-methylpseudouracil
  modified_base 632: mod_base = OTHER; note = N1-methylpseudouracil
  modified_base 635: mod_base = OTHER; note = N1-methylpseudouracil
  modified_base 644: mod_base = OTHER; note = N1-methylpseudouracil
  modified_base 650: mod_base = OTHER; note = N1-methylpseudouracil
  modified_base 654: mod_base = OTHER; note = N1-methylpseudouracil
  modified_base 655: mod_base = OTHER; note = N1-methylpseudouracil
  modified_base 670: mod_base = OTHER; note = N1-methylpseudouracil
  modified_base 682: mod_base = OTHER; note = N1-methylpseudouracil
  modified_base 683: mod_base = OTHER; note = N1-methylpseudouracil
  modified_base 704: mod_base = OTHER; note = N1-methylpseudouracil
  modified_base 707: mod_base = OTHER; note = N1-methylpseudouracil
  modified_base 710: mod_base = OTHER; note = N1-methylpseudouracil
  modified_base 715: mod_base = OTHER; note = N1-methylpseudouracil
  modified_base 734: mod_base = OTHER; note = N1-methylpseudouracil
  modified_base 737: mod_base = OTHER; note = N1-methylpseudouracil
  modified_base 743: mod_base = OTHER; note = N1-methylpseudouracil
  modified_base 746: mod_base = OTHER; note = N1-methylpseudouracil
  modified_base 754: mod_base = OTHER; note = N1-methylpseudouracil
  modified_base 758: mod_base = OTHER; note = N1-methylpseudouracil
  modified_base 776: mod_base = OTHER; note = N1-methylpseudouracil
  modified_base 790: mod_base = OTHER; note = N1-methylpseudouracil
  modified_base 791: mod_base = OTHER; note = N1-methylpseudouracil
  modified_base 796: mod_base = OTHER; note = N1-methylpseudouracil
  modified_base 797: mod_base = OTHER; note = N1-methylpseudouracil
  modified_base 799: mod_base = OTHER; note = N1-methylpseudouracil
  modified_base 809: mod_base = OTHER; note = N1-methylpseudouracil
  modified_base 821: mod_base = OTHER; note = N1-methylpseudouracil
  modified_base 833: mod_base = OTHER; note = N1-methylpseudouracil
  modified_base 844: mod_base = OTHER; note = N1-methylpseudouracil
  modified_base 845: mod_base = OTHER; note = N1-methylpseudouracil
  modified_base 848: mod_base = OTHER; note = N1-methylpseudouracil
  modified_base 854: mod_base = OTHER; note = N1-methylpseudouracil
  modified_base 871: mod_base = OTHER; note = N1-methylpseudouracil
  modified_base 893: mod_base = OTHER; note = N1-methylpseudouracil
  modified_base 901: mod_base = OTHER; note = N1-methylpseudouracil
  modified_base 902: mod_base = OTHER; note = N1-methylpseudouracil
  modified_base 920: mod_base = OTHER; note = N1-methylpseudouracil
  modified_base 923: mod_base = OTHER; note = N1-methylpseudouracil
  modified_base 926: mod_base = OTHER; note = N1-methylpseudouracil
  modified_base 932: mod_base = OTHER; note = N1-methylpseudouracil
  modified_base 934: mod_base = OTHER; note = N1-methylpseudouracil
  modified_base 935: mod_base = OTHER; note = N1-methylpseudouracil
  modified_base 959: mod_base = OTHER; note = N1-methylpseudouracil
  modified_base 962: mod_base = OTHER; note = N1-methylpseudouracil
  modified_base 964: mod_base = OTHER; note = N1-methylpseudouracil
  modified_base 983: mod_base = OTHER; note = N1-methylpseudouracil
  modified_base 988: mod_base = OTHER; note = N1-methylpseudouracil
  modified_base 998: mod_base = OTHER; note = N1-methylpseudouracil
  modified_base 1010: mod_base = OTHER; note = N1-methylpseudouracil
  modified_base 1013: mod_base = OTHER; note = N1-methylpseudouracil
  modified_base 1016: mod_base = OTHER; note = N1-methylpseudouracil
  modified_base 1018: mod_base = OTHER; note = N1-methylpseudouracil
  modified_base 1021: mod_base = OTHER; note = N1-methylpseudouracil
  modified_base 1022: mod_base = OTHER; note = N1-methylpseudouracil
  modified_base 1024: mod_base = OTHER; note = N1-methylpseudouracil
  modified_base 1042: mod_base = OTHER; note = N1-methylpseudouracil
  modified_base 1043: mod_base = OTHER; note = N1-methylpseudouracil
  modified_base 1049: mod_base = OTHER; note = N1-methylpseudouracil
  modified_base 1054: mod_base = OTHER; note = N1-methylpseudouracil
  modified_base 1055: mod_base = OTHER; note = N1-methylpseudouracil
  modified_base 1061: mod_base = OTHER; note = N1-methylpseudouracil
  modified_base 1064: mod_base = OTHER; note = N1-methylpseudouracil
  modified_base 1073: mod_base = OTHER; note = N1-methylpseudouracil
  modified_base 1076: mod_base = OTHER; note = N1-methylpseudouracil
  modified_base 1082: mod_base = OTHER; note = N1-methylpseudouracil
  modified_base 1091: mod_base = OTHER; note = N1-methylpseudouracil
  modified_base 1094: mod_base = OTHER; note = N1-methylpseudouracil
  modified_base 1102: mod_base = OTHER; note = N1-methylpseudouracil
  modified_base 1108: mod_base = OTHER; note = N1-methylpseudouracil
  modified_base 1118: mod_base = OTHER; note = N1-methylpseudouracil
  modified_base 1120: mod_base = OTHER; note = N1-methylpseudouracil
  modified_base 1124: mod_base = OTHER; note = N1-methylpseudouracil
  modified_base 1127: mod_base = OTHER; note = N1-methylpseudouracil
  modified_base 1136: mod_base = OTHER; note = N1-methylpseudouracil
  modified_base 1139: mod_base = OTHER; note = N1-methylpseudouracil
  modified_base 1144: mod_base = OTHER; note = N1-methylpseudouracil
  modified_base 1167: mod_base = OTHER; note = N1-methylpseudouracil
  modified_base 1168: mod_base = OTHER; note = N1-methylpseudouracil
  modified_base 1174: mod_base = OTHER; note = N1-methylpseudouracil
  modified_base 1180: mod_base = OTHER; note = N1-methylpseudouracil
  modified_base 1184: mod_base = OTHER; note = N1-methylpseudouracil
  modified_base 1196: mod_base = OTHER; note = N1-methylpseudouracil
  modified_base 1198: mod_base = OTHER; note = N1-methylpseudouracil
  modified_base 1207: mod_base = OTHER; note = N1-methylpseudouracil
  modified_base 1214: mod_base = OTHER; note = N1-methylpseudouracil
  modified_base 1216: mod_base = OTHER; note = N1-methylpseudouracil
  modified_base 1217: mod_base = OTHER; note = N1-methylpseudouracil
  modified_base 1220: mod_base = OTHER; note = N1-methylpseudouracil
  modified_base 1226: mod_base = OTHER; note = N1-methylpseudouracil
  modified_base 1228: mod_base = OTHER; note = N1-methylpseudouracil
  modified_base 1229: mod_base = OTHER; note = N1-methylpseudouracil
  modified_base 1235: mod_base = OTHER; note = N1-methylpseudouracil
  modified_base 1243: mod_base = OTHER; note = N1-methylpseudouracil
  modified_base 1247: mod_base = OTHER; note = N1-methylpseudouracil
  modified_base 1250: mod_base = OTHER; note = N1-methylpseudouracil
  modified_base 1254: mod_base = OTHER; note = N1-methylpseudouracil
  modified_base 1261: mod_base = OTHER; note = N1-methylpseudouracil
  modified_base 1265: mod_base = OTHER; note = N1-methylpseudouracil
  modified_base 1269: mod_base = OTHER; note = N1-methylpseudouracil
  modified_base 1274: mod_base = OTHER; note = N1-methylpseudouracil
  modified_base 1286: mod_base = OTHER; note = N1-methylpseudouracil
  modified_base 1294: mod_base = OTHER; note = N1-methylpseudouracil
  modified_base 1295: mod_base = OTHER; note = N1-methylpseudouracil
  modified_base 1298: mod_base = OTHER; note = N1-methylpseudouracil
  modified_base 1300: mod_base = OTHER; note = N1-methylpseudouracil
  modified_base 1312: mod_base = OTHER; note = N1-methylpseudouracil
  modified_base 1315: mod_base = OTHER; note = N1-methylpseudouracil
  modified_base 1327: mod_base = OTHER; note = N1-methylpseudouracil
  modified_base 1330: mod_base = OTHER; note = N1-methylpseudouracil
  modified_base 1331: mod_base = OTHER; note = N1-methylpseudouracil
  modified_base 1333: mod_base = OTHER; note = N1-methylpseudouracil
  modified_base 1336: mod_base = OTHER; note = N1-methylpseudouracil
  modified_base 1345: mod_base = OTHER; note = N1-methylpseudouracil
  modified_base 1364: mod_base = OTHER; note = N1-methylpseudouracil
  modified_base 1371: mod_base = OTHER; note = N1-methylpseudouracil
  modified_base 1376: mod_base = OTHER; note = N1-methylpseudouracil
  modified_base 1379: mod_base = OTHER; note = N1-methylpseudouracil
  modified_base 1385: mod_base = OTHER; note = N1-methylpseudouracil
  modified_base 1390: mod_base = OTHER; note = N1-methylpseudouracil
  modified_base 1396: mod_base = OTHER; note = N1-methylpseudouracil
  modified_base 1400: mod_base = OTHER; note = N1-methylpseudouracil
  modified_base 1402: mod_base = OTHER; note = N1-methylpseudouracil
  modified_base 1407: mod_base = OTHER; note = N1-methylpseudouracil
  modified_base 1414: mod_base = OTHER; note = N1-methylpseudouracil
  modified_base 1418: mod_base = OTHER; note = N1-methylpseudouracil
  modified_base 1423: mod_base = OTHER; note = N1-methylpseudouracil
  modified_base 1427: mod_base = OTHER; note = N1-methylpseudouracil
  modified_base 1428: mod_base = OTHER; note = N1-methylpseudouracil
  modified_base 1430: mod_base = OTHER; note = N1-methylpseudouracil
  modified_base 1431: mod_base = OTHER; note = N1-methylpseudouracil
  modified_base 1437: mod_base = OTHER; note = N1-methylpseudouracil
  modified_base 1438: mod_base = OTHER; note = N1-methylpseudouracil
  modified_base 1444: mod_base = OTHER; note = N1-methylpseudouracil
  modified_base 1457: mod_base = OTHER; note = N1-methylpseudouracil
  modified_base 1460: mod_base = OTHER; note = N1-methylpseudouracil
  modified_base 1465: mod_base = OTHER; note = N1-methylpseudouracil
  modified_base 1466: mod_base = OTHER; note = N1-methylpseudouracil
  modified_base 1469: mod_base = OTHER; note = N1-methylpseudouracil
  modified_base 1477: mod_base = OTHER; note = N1-methylpseudouracil
  modified_base 1485: mod_base = OTHER; note = N1-methylpseudouracil
  modified_base 1488: mod_base = OTHER; note = N1-methylpseudouracil
  modified_base 1490: mod_base = OTHER; note = N1-methylpseudouracil
  modified_base 1491: mod_base = OTHER; note = N1-methylpseudouracil
  modified_base 1492: mod_base = OTHER; note = N1-methylpseudouracil
  modified_base 1496: mod_base = OTHER; note = N1-methylpseudouracil
  modified_base 1501: mod_base = OTHER; note = N1-methylpseudouracil
  modified_base 1503: mod_base = OTHER; note = N1-methylpseudouracil
  modified_base 1507: mod_base = OTHER; note = N1-methylpseudouracil
ggaaatcgcaaaatttgctcttcgcgttagatttcttttagttttctcgcaactagcaagctttttgttctcgccatgggcagcagcaagtccaagcccaaggacccttcccagagaaggaggggtggcggctctagcggctgccccttcctgggcaacaacttcggctacaccttcaagaagctgcccgtggagggcagcgaggaggacaagtcccagaccggcgtgaaccgggccagcaagggtggcctgatctacggcaactacctgcacctggagaaggtgctgaacgcccaggagctgcagtccgagaccaagggcaataagatccacgacgagcacctgttcatcatcacccaccaggcctacgagctgtggttcaagcagatcctgtgggagctggatagcgtgagggagatcttccagaacggccacgtgcgggacgagcgcaacatgctgaaggtggtgagccggatgcaccgggtgtccgtgatcctgaagctgctggtgcagcagttcagtatcctggagaccatgaccgccctggacttcaacgacttccgggagtacctgagcccagcctccgggttccagtccctgcagttcagactgctggagaacaagatcggggtgctgcagaacatgcgggtgccttacaaccggcggcactaccgggacaacttcaagggcgaggagaacgagctgctgctgaagtccgagcaggagaagaccctgctggagctggtggaggcctggctggagcggacacccgggctggagccacacgggttcaacttctggggcaagctggagaagaacatcaccagaggcctggaggaggagttcatccgcatccaggccaaggaagagtccgaggagaaggaggagcaggtggccgagttccagaagcagaaggaggtgctgctgagcctgttcgacgagaagaggcacgagcacctgctgtccaagggcgagaggcggctgagctacagagccctacagggcgccctgatgatctacttctacagggaggagccccgcttccaggtgcccttccagctgctgaccagcctgatggacatcgacagcctgatgaccaagtggcggtacaaccacgtgtgcatggtgcaccggatgctgggctccaaagccggaacgggcggcagttccggctaccactacctgcggagcaccgtgtccgaccggtacaaggtgttcgtggacctgttcaacctgagcacctacctgatccctcggcactggatccctaagatgaaccccaccatccacaagttcctgtacaccgccgagtactgcgacagcagctacttctcctccgacgagtccgacggcggaaagcccatccccaatcccctgctgggcctggactccacctaagtctccgctggagcctcggtggcctagcttcttgccccttgggcctccccccagcccctcctccccttcctgcacccgtacccccgtggtctttgaataaagtctgagtgggcggc

SEQ ID NO: 325 - RNA, 1514 nt, synthetic construct
  source 1..1514: mol_type = other RNA
  modified_base 6: mod_base = OTHER; note = N1-methylpseudouracil
  modified_base 14: mod_base = OTHER; note = N1-methylpseudouracil
  modified_base 15: mod_base = OTHER; note = N1-methylpseudouracil
  modified_base 16: mod_base = OTHER; note = N1-methylpseudouracil
  modified_base 19: mod_base = OTHER; note = N1-methylpseudouracil
  modified_base 21: mod_base = OTHER; note = N1-methylpseudouracil
  modified_base 22: mod_base = OTHER; note = N1-methylpseudouracil
  modified_base 27: mod_base = OTHER; note = N1-methylpseudouracil
  modified_base 28: mod_base = OTHER; note = N1-methylpseudouracil
  modified_base 32: mod_base = OTHER; note = N1-methylpseudouracil
  modified_base 33: mod_base = OTHER; note = N1-methylpseudouracil
  modified_base 34: mod_base = OTHER; note = N1-methylpseudouracil
  modified_base 36: mod_base = OTHER; note = N1-methylpseudouracil
  modified_base 37: mod_base = OTHER; note = N1-methylpseudouracil
  modified_base 38: mod_base = OTHER; note = N1-methylpseudouracil
  modified_base 39: mod_base = OTHER; note = N1-methylpseudouracil
  modified_base 42: mod_base = OTHER; note = N1-methylpseudouracil
  modified_base 43: mod_base = OTHER; note = N1-methylpseudouracil
  modified_base 44: mod_base = OTHER; note = N1-methylpseudouracil
  modified_base 45: mod_base = OTHER; note = N1-methylpseudouracil
  modified_base 47: mod_base = OTHER; note = N1-methylpseudouracil
  modified_base 54: mod_base = OTHER; note = N1-methylpseudouracil
  modified_base 62: mod_base = OTHER; note = N1-methylpseudouracil
  modified_base 63: mod_base = OTHER; note = N1-methylpseudouracil
  modified_base 64: mod_base = OTHER; note = N1-methylpseudouracil
  modified_base 65: mod_base = OTHER; note = N1-methylpseudouracil
  modified_base 66: mod_base = OTHER; note = N1-methylpseudouracil
  modified_base 68: mod_base = OTHER; note = N1-methylpseudouracil
  modified_base 69: mod_base = OTHER; note = N1-methylpseudouracil
  modified_base 71: mod_base = OTHER; note = N1-methylpseudouracil
  modified_base 77: mod_base = OTHER; note = N1-methylpseudouracil
  modified_base 91: mod_base = OTHER; note = N1-methylpseudouracil
  modified_base 108: mod_base = OTHER; note = N1-methylpseudouracil
  modified_base 109: mod_base = OTHER; note = N1-methylpseudouracil
  modified_base 126: mod_base = OTHER; note = N1-methylpseudouracil
  modified_base 133: mod_base = OTHER; note = N1-methylpseudouracil
  modified_base 135: mod_base = OTHER; note = N1-methylpseudouracil
  modified_base 142: mod_base = OTHER; note = N1-methylpseudouracil
  modified_base 148: mod_base = OTHER; note = N1-methylpseudouracil
  modified_base 149: mod_base = OTHER; note = N1-methylpseudouracil
  modified_base 152: mod_base = OTHER; note = N1-methylpseudouracil
  modified_base 163: mod_base = OTHER; note = N1-methylpseudouracil
  modified_base 164: mod_base = OTHER; note = N1-methylpseudouracil
  modified_base 169: mod_base = OTHER; note = N1-methylpseudouracil
  modified_base 175: mod_base = OTHER; note = N1-methylpseudouracil
  modified_base 176: mod_base = OTHER; note = N1-methylpseudouracil
  modified_base 185: mod_base = OTHER; note = N1-methylpseudouracil
  modified_base 191: mod_base = OTHER; note = N1-methylpseudouracil
  modified_base 214: mod_base = OTHER; note = N1-methylpseudouracil
  modified_base 227: mod_base = OTHER; note = N1-methylpseudouracil
  modified_base 246: mod_base = OTHER; note = N1-methylpseudouracil
  modified_base 251: mod_base = OTHER; note = N1-methylpseudouracil
  modified_base 254: mod_base = OTHER; note = N1-methylpseudouracil
  modified_base 256: mod_base = OTHER; note = N1-methylpseudouracil
  modified_base 265: mod_base = OTHER; note = N1-methylpseudouracil
  modified_base 269: mod_base = OTHER; note = N1-methylpseudouracil
  modified_base 275: mod_base = OTHER; note = N1-methylpseudouracil
  modified_base 284: mod_base = OTHER; note = N1-methylpseudouracil
  modified_base 287: mod_base = OTHER; note = N1-methylpseudouracil
  modified_base 302: mod_base = OTHER; note = N1-methylpseudouracil
  modified_base 307: mod_base = OTHER; note = N1-methylpseudouracil
  modified_base 324: mod_base = OTHER; note = N1-methylpseudouracil
  modified_base 329: mod_base = OTHER; note = N1-methylpseudouracil
  modified_base 344: mod_base = OTHER; note = N1-methylpseudouracil
  modified_base 346: mod_base = OTHER; note = N1-methylpseudouracil
  modified_base 347: mod_base = OTHER; note = N1-methylpseudouracil
  modified_base 350: mod_base = OTHER; note = N1-methylpseudouracil
  modified_base 353: mod_base = OTHER; note = N1-methylpseudouracil
  modified_base 367: mod_base = OTHER; note = N1-methylpseudouracil
  modified_base 374: mod_base = OTHER; note = N1-methylpseudouracil
  modified_base 376: mod_base = OTHER; note = N1-methylpseudouracil
  modified_base 379: mod_base = OTHER; note = N1-methylpseudouracil
  modified_base 380: mod_base = OTHER; note = N1-methylpseudouracil
  modified_base 389: mod_base = OTHER; note = N1-methylpseudouracil
  modified_base 392: mod_base = OTHER; note = N1-methylpseudouracil
  modified_base 394: mod_base = OTHER; note = N1-methylpseudouracil
  modified_base 401: mod_base = OTHER; note = N1-methylpseudouracil
  modified_base 405: mod_base = OTHER; note = N1-methylpseudouracil
  modified_base 410: mod_base = OTHER; note = N1-methylpseudouracil
  modified_base 419: mod_base = OTHER; note = N1-methylpseudouracil
  modified_base 421: mod_base = OTHER; note = N1-methylpseudouracil
  modified_base 422: mod_base = OTHER; note = N1-methylpseudouracil
  modified_base 437: mod_base = OTHER; note = N1-methylpseudouracil
  modified_base 455: mod_base = OTHER; note = N1-methylpseudouracil
  modified_base 458: mod_base = OTHER; note = N1-methylpseudouracil
  modified_base 464: mod_base = OTHER; note = N1-methylpseudouracil
  modified_base 467: mod_base = OTHER; note = N1-methylpseudouracil
  modified_base 476: mod_base = OTHER; note = N1-methylpseudouracil
  modified_base 485: mod_base = OTHER; note = N1-methylpseudouracil
  modified_base 487: mod_base = OTHER; note = N1-methylpseudouracil
  modified_base 491: mod_base = OTHER; note = N1-methylpseudouracil
  modified_base 494: mod_base = OTHER; note = N1-methylpseudouracil
  modified_base 497: mod_base = OTHER; note = N1-methylpseudouracil
  modified_base 503: mod_base = OTHER; note = N1-methylpseudouracil
  modified_base 506: mod_base = OTHER; note = N1-methylpseudouracil
  modified_base 509: mod_base = OTHER; note = N1-methylpseudouracil
  modified_base 517: mod_base = OTHER; note = N1-methylpseudouracil
  modified_base 518: mod_base = OTHER; note = N1-methylpseudouracil
  modified_base 522: mod_base = OTHER; note = N1-methylpseudouracil
  modified_base 524: mod_base = OTHER; note = N1-methylpseudouracil
  modified_base 527: mod_base = OTHER; note = N1-methylpseudouracil
  modified_base 536: mod_base = OTHER; note = N1-methylpseudouracil
  modified_base 545: mod_base = OTHER; note = N1-methylpseudouracil
  modified_base 550: mod_base = OTHER; note = N1-methylpseudouracil
  modified_base 551: mod_base = OTHER; note = N1-methylpseudouracil
  modified_base 559: mod_base = OTHER; note = N1-methylpseudouracil
  modified_base 560: mod_base = OTHER; note = N1-methylpseudouracil
  modified_base 568: mod_base = OTHER; note = N1-methylpseudouracil
  modified_base 572: mod_base = OTHER; note = N1-methylpseudouracil
  modified_base 583: mod_base = OTHER; note = N1-methylpseudouracil
  modified_base 589: mod_base = OTHER; note = N1-methylpseudouracil
  modified_base 590: mod_base = OTHER; note = N1-methylpseudouracil
  modified_base 595: mod_base = OTHER; note = N1-methylpseudouracil
  modified_base 599: mod_base = OTHER; note = N1-methylpseudouracil
  modified_base 604: mod_base = OTHER; note = N1-methylpseudouracil
  modified_base 605: mod_base = OTHER; note = N1-methylpseudouracil
  modified_base 611: mod_base = OTHER; note = N1-methylpseudouracil
  modified_base 614: mod_base = OTHER; note = N1-methylpseudouracil
  modified_base 626: mod_base = OTHER; note = N1-methylpseudouracil
  modified_base 632: mod_base = OTHER; note = N1-methylpseudouracil
  modified_base 635: mod_base = OTHER; note = N1-methylpseudouracil
  modified_base 644: mod_base = OTHER; note = N1-methylpseudouracil
  modified_base 650: mod_base = OTHER; note = N1-methylpseudouracil
  modified_base 654: mod_base = OTHER; note = N1-methylpseudouracil
  modified_base 655: mod_base = OTHER; note = N1-methylpseudouracil
  modified_base 670: mod_base = OTHER; note = N1-methylpseudouracil
  modified_base 682: mod_base = OTHER; note = N1-methylpseudouracil
  modified_base 683: mod_base = OTHER; note = N1-methylpseudouracil
  modified_base 704: mod_base = OTHER; note = N1-methylpseudouracil
  modified_base 707: mod_base = OTHER; note = N1-methylpseudouracil
  modified_base 710: mod_base = OTHER; note = N1-methylpseudouracil
  modified_base 715: mod_base = OTHER; note = N1-methylpseudouracil
  modified_base 734: mod_base = OTHER; note = N1-methylpseudouracil
  modified_base 737: mod_base = OTHER; note = N1-methylpseudouracil
  modified_base 743: mod_base = OTHER; note = N1-methylpseudouracil
  modified_base 746: mod_base = OTHER; note = N1-methylpseudouracil
  modified_base 754: mod_base = OTHER; note = N1-methylpseudouracil
  modified_base 758: mod_base = OTHER; note = N1-methylpseudouracil
  modified_base 776: mod_base = OTHER; note = N1-methylpseudouracil
  modified_base 790: mod_base = OTHER; note = N1-methylpseudouracil
  modified_base 791: mod_base = OTHER; note = N1-methylpseudouracil
  modified_base 796: mod_base = OTHER; note = N1-methylpseudouracil
  modified_base 797: mod_base = OTHER; note = N1-methylpseudouracil
  modified_base 799: mod_base = OTHER; note = N1-methylpseudouracil
  modified_base 809: mod_base = OTHER; note = N1-methylpseudouracil
  modified_base 821: mod_base = OTHER; note = N1-methylpseudouracil
  modified_base 833: mod_base = OTHER; note = N1-methylpseudouracil
  modified_base 844: mod_base = OTHER; note = N1-methylpseudouracil
  modified_base 845: mod_base = OTHER; note = N1-methylpseudouracil
  modified_base 848: mod_base = OTHER; note = N1-methylpseudouracil
  modified_base 854: mod_base = OTHER; note = N1-methylpseudouracil
  modified_base 871: mod_base = OTHER; note = N1-methylpseudouracil
  modified_base 893: mod_base = OTHER; note = N1-methylpseudouracil
  modified_base 901: mod_base = OTHER; note = N1-methylpseudouracil
  modified_base 902: mod_base = OTHER; note = N1-methylpseudouracil
  modified_base 920: mod_base = OTHER; note = N1-methylpseudouracil
  modified_base 923: mod_base = OTHER; note = N1-methylpseudouracil
  modified_base 926: mod_base = OTHER; note = N1-methylpseudouracil
  modified_base 932: mod_base = OTHER; note = N1-methylpseudouracil
  modified_base 934: mod_base = OTHER; note = N1-methylpseudouracil
  modified_base 935: mod_base = OTHER; note = N1-methylpseudouracil
  modified_base 959: mod_base = OTHER; note = N1-methylpseudouracil
  modified_base 962: mod_base = OTHER; note = N1-methylpseudouracil
  modified_base 964: mod_base = OTHER; note = N1-methylpseudouracil
  modified_base 983: mod_base = OTHER; note = N1-methylpseudouracil
  modified_base 988: mod_base = OTHER; note = N1-methylpseudouracil
  modified_base 998: mod_base = OTHER; note = N1-methylpseudouracil
  modified_base 1010: mod_base = OTHER; note = N1-methylpseudouracil
  modified_base 1013: mod_base = OTHER; note = N1-methylpseudouracil
  modified_base 1016: mod_base = OTHER; note = N1-methylpseudouracil
  modified_base 1018: mod_base = OTHER; note = N1-methylpseudouracil
  modified_base 1021: mod_base = OTHER; note = N1-methylpseudouracil
  modified_base 1022: mod_base = OTHER; note = N1-methylpseudouracil
  modified_base 1024: mod_base = OTHER; note = N1-methylpseudouracil
  modified_base 1042: mod_base = OTHER; note = N1-methylpseudouracil
  modified_base 1043: mod_base = OTHER; note = N1-methylpseudouracil
  modified_base 1049: mod_base = OTHER; note = N1-methylpseudouracil
  modified_base 1054: mod_base = OTHER; note = N1-methylpseudouracil
  modified_base 1055: mod_base = OTHER; note = N1-methylpseudouracil
  modified_base 1061: mod_base = OTHER; note = N1-methylpseudouracil
  modified_base 1064: mod_base = OTHER; note = N1-methylpseudouracil
  modified_base 1073: mod_base = OTHER; note = N1-methylpseudouracil
  modified_base 1076: mod_base = OTHER; note = N1-methylpseudouracil
  modified_base 1082: mod_base = OTHER; note = N1-methylpseudouracil
  modified_base 1091: mod_base = OTHER; note = N1-methylpseudouracil
  modified_base 1094: mod_base = OTHER; note = N1-methylpseudouracil
  modified_base 1102: mod_base = OTHER; note = N1-methylpseudouracil
  modified_base 1108: mod_base = OTHER; note = N1-methylpseudouracil
  modified_base 1118: mod_base = OTHER; note = N1-methylpseudouracil
  modified_base 1120: mod_base = OTHER; note = N1-methylpseudouracil
  modified_base 1124: mod_base = OTHER; note = N1-methylpseudouracil
  modified_base 1127: mod_base = OTHER; note = N1-methylpseudouracil
  modified_base 1136: mod_base = OTHER; note = N1-methylpseudouracil
  modified_base 1139: mod_base = OTHER; note = N1-methylpseudouracil
  modified_base 1144: mod_base = OTHER; note = N1-methylpseudouracil
  modified_base 1167: mod_base = OTHER; note = N1-methylpseudouracil
  modified_base 1168: mod_base = OTHER; note = N1-methylpseudouracil
  modified_base 1174: mod_base = OTHER; note = N1-methylpseudouracil
  modified_base 1180: mod_base = OTHER; note = N1-methylpseudouracil
  modified_base 1184: mod_base = OTHER; note = N1-methylpseudouracil
  modified_base 1196: mod_base = OTHER; note = N1-methylpseudouracil
  modified_base 1198: mod_base = OTHER; note = N1-methylpseudouracil
  modified_base 1207: mod_base = OTHER; note = N1-methylpseudouracil
  modified_base 1214: mod_base = OTHER; note = N1-methylpseudouracil
  modified_base 1216: mod_base = OTHER; note = N1-methylpseudouracil
  modified_base 1217: mod_base = OTHER; note = N1-methylpseudouracil
  modified_base 1220: mod_base = OTHER; note = N1-methylpseudouracil
  modified_base 1226: mod_base = OTHER; note = N1-methylpseudouracil
  modified_base 1228: mod_base = OTHER; note = N1-methylpseudouracil
  modified_base 1229: mod_base = OTHER; note = N1-methylpseudouracil
  modified_base 1235: mod_base = OTHER; note = N1-methylpseudouracil
  modified_base 1243: mod_base = OTHER; note = N1-methylpseudouracil
  modified_base 1247: mod_base = OTHER; note = N1-methylpseudouracil
  modified_base 1250: mod_base = OTHER; note = N1-methylpseudouracil
  modified_base 1254: mod_base = OTHER; note = N1-methylpseudouracil
  modified_base 1261: mod_base = OTHER; note = N1-methylpseudouracil
  modified_base 1265: mod_base = OTHER; note = N1-methylpseudouracil
  modified_base 1269: mod_base = OTHER; note = N1-methylpseudouracil
  modified_base 1274: mod_base = OTHER; note = N1-methylpseudouracil
  modified_base 1286: mod_base = OTHER; note = N1-methylpseudouracil
  modified_base 1294: mod_base = OTHER; note = N1-methylpseudouracil
  modified_base 1295: mod_base = OTHER; note = N1-methylpseudouracil
  modified_base 1298: mod_base = OTHER; note = N1-methylpseudouracil
  modified_base 1300: mod_base = OTHER; note = N1-methylpseudouracil
  modified_base 1312: mod_base = OTHER; note = N1-methylpseudouracil
  modified_base 1315: mod_base = OTHER; note = N1-methylpseudouracil
  modified_base 1327: mod_base = OTHER; note = N1-methylpseudouracil
  modified_base 1330: mod_base = OTHER; note = N1-methylpseudouracil
  modified_base 1331: mod_base = OTHER; note = N1-methylpseudouracil
  modified_base 1333: mod_base = OTHER; note = N1-methylpseudouracil
  modified_base 1336: mod_base = OTHER; note = N1-methylpseudouracil
  modified_base 1345: mod_base = OTHER; note = N1-methylpseudouracil
  modified_base 1364: mod_base = OTHER; note = N1-methylpseudouracil
  modified_base 1371: mod_base = OTHER; note = N1-methylpseudouracil
  modified_base 1376: mod_base = OTHER; note = N1-methylpseudouracil
  modified_base 1379: mod_base = OTHER; note = N1-methylpseudouracil
  modified_base 1385: mod_base = OTHER; note = N1-methylpseudouracil
  modified_base 1390: mod_base = OTHER; note = N1-methylpseudouracil
  modified_base 1396: mod_base = OTHER; note = N1-methylpseudouracil
  modified_base 1404: mod_base = OTHER; note = N1-methylpseudouracil
  modified_base 1414: mod_base = OTHER; note = N1-methylpseudouracil
  modified_base 1418: mod_base = OTHER; note = N1-methylpseudouracil
  modified_base 1423: mod_base = OTHER; note = N1-methylpseudouracil
  modified_base 1427: mod_base = OTHER; note = N1-methylpseudouracil
  modified_base 1428: mod_base = OTHER; note = N1-methylpseudouracil
  modified_base 1430: mod_base = OTHER; note = N1-methylpseudouracil
  modified_base 1431: mod_base = OTHER; note = N1-methylpseudouracil
  modified_base 1437: mod_base = OTHER; note = N1-methylpseudouracil
  modified_base 1438: mod_base = OTHER; note = N1-methylpseudouracil
  modified_base 1444: mod_base = OTHER; note = N1-methylpseudouracil
  modified_base 1457: mod_base = OTHER; note = N1-methylpseudouracil
  modified_base 1460: mod_base = OTHER; note = N1-methylpseudouracil
  modified_base 1465: mod_base = OTHER; note = N1-methylpseudouracil
  modified_base 1466: mod_base = OTHER; note = N1-methylpseudouracil
  modified_base 1469: mod_base = OTHER; note = N1-methylpseudouracil
  modified_base 1477: mod_base = OTHER; note = N1-methylpseudouracil
  modified_base 1485: mod_base = OTHER; note = N1-methylpseudouracil
  modified_base 1488: mod_base = OTHER; note = N1-methylpseudouracil
  modified_base 1490: mod_base = OTHER; note = N1-methylpseudouracil
  modified_base 1491: mod_base = OTHER; note = N1-methylpseudouracil
  modified_base 1492: mod_base = OTHER; note = N1-methylpseudouracil
  modified_base 1496: mod_base = OTHER; note = N1-methylpseudouracil
  modified_base 1501: mod_base = OTHER; note = N1-methylpseudouracil
  modified_base 1503: mod_base = OTHER; note = N1-methylpseudouracil
  modified_base 1507: mod_base = OTHER; note = N1-methylpseudouracil
ggaaatcgcaaaatttgctcttcgcgttagatttcttttagttttctcgcaactagcaagctttttgttctcgccatgggcagcagcaagtccaagcccaaggacccttcccagagaaggaggggtggcggctctagcggctgccccttcctgggcaacaacttcggctacaccttcaagaagctgcccgtggagggcagcgaggaggacaagtcccagaccggcgtgaaccgggccagcaagggtggcctgatctacggcaactacctgcacctggagaaggtgctgaacgcccaggagctgcagtccgagaccaagggcaataagatccacgacgagcacctgttcatcatcacccaccaggcctacgagctgtggttcaagcagatcctgtgggagctggatagcgtgagggagatcttccagaacggccacgtgcgggacgagcgcaacatgctgaaggtggtgagccggatgcaccgggtgtccgtgatcctgaagctgctggtgcagcagttcagtatcctggagaccatgaccgccctggacttcaacgacttccgggagtacctgagcccagcctccgggttccagtccctgcagttcagactgctggagaacaagatcggggtgctgcagaacatgcgggtgccttacaaccggcggcactaccgggacaacttcaagggcgaggagaacgagctgctgctgaagtccgagcaggagaagaccctgctggagctggtggaggcctggctggagcggacacccgggctggagccacacgggttcaacttctggggcaagctggagaagaacatcaccagaggcctggaggaggagttcatccgcatccaggccaaggaagagtccgaggagaaggaggagcaggtggccgagttccagaagcagaaggaggtgctgctgagcctgttcgacgagaagaggcacgagcacctgctgtccaagggcgagaggcggctgagctacagagccctacagggcgccctgatgatctacttctacagggaggagccccgcttccaggtgcccttccagctgctgaccagcctgatggacatcgacagcctgatgaccaagtggcggtacaaccacgtgtgcatggtgcaccggatgctgggctccaaagccggaacgggcggcagttccggctaccactacctgcggagcaccgtgtccgaccggtacaaggtgttcgtggacctgttcaacctgagcacctacctgatccctcggcactggatccctaagatgaaccccaccatccacaagttcctgtacaccgccgagtactgcgacagcagctacttctcctccgacgagtccgacggcggaaagcccatccccaatcccctgctgggcctggactccacctaagcccctccgggggcctcggtggcctagcttcttgccccttgggcctccccccagcccctcctccccttcctgcacccgtacccccgtggtctttgaataaagtctgagtgggcggc

SEQ ID NO: 326 - RNA, 1514 nt, synthetic construct
  source 1..1514: mol_type = other RNA
  modified_base 6: mod_base = OTHER; note = N1-methylpseudouracil
  modified_base 14: mod_base = OTHER; note = N1-methylpseudouracil
  modified_base 15: mod_base = OTHER; note = N1-methylpseudouracil
  modified_base 16: mod_base = OTHER; note = N1-methylpseudouracil
  modified_base 19: mod_base = OTHER; note = N1-methylpseudouracil
  modified_base 21: mod_base = OTHER; note = N1-methylpseudouracil
  modified_base 22: mod_base = OTHER; note = N1-methylpseudouracil
  modified_base 27: mod_base = OTHER; note = N1-methylpseudouracil
  modified_base 28: mod_base = OTHER; note = N1-methylpseudouracil
  modified_base 32: mod_base = OTHER; note = N1-methylpseudouracil
  modified_base 33: mod_base = OTHER; note = N1-methylpseudouracil
  modified_base 34: mod_base = OTHER; note = N1-methylpseudouracil
  modified_base 36: mod_base = OTHER; note = N1-methylpseudouracil
  modified_base 37: mod_base = OTHER; note = N1-methylpseudouracil
  modified_base 38: mod_base = OTHER; note = N1-methylpseudouracil
  modified_base 39: mod_base = OTHER; note = N1-methylpseudouracil
  modified_base 42: mod_base = OTHER; note = N1-methylpseudouracil
  modified_base 43: mod_base = OTHER; note = N1-methylpseudouracil
  modified_base 44: mod_base = OTHER; note = N1-methylpseudouracil
  modified_base 45: mod_base = OTHER; note = N1-methylpseudouracil
  modified_base 47: mod_base = OTHER; note = N1-methylpseudouracil
  modified_base 54: mod_base = OTHER; note = N1-methylpseudouracil
  modified_base 62: mod_base = OTHER; note = N1-methylpseudouracil
  modified_base 63: mod_base = OTHER; note = N1-methylpseudouracil
  modified_base 64: mod_base = OTHER; note = N1-methylpseudouracil
  modified_base 65: mod_base = OTHER; note = N1-methylpseudouracil
  modified_base 66: mod_base = OTHER; note = N1-methylpseudouracil
  modified_base 68: mod_base = OTHER; note = N1-methylpseudouracil
  modified_base 69: mod_base = OTHER; note = N1-methylpseudouracil
  modified_base 71: mod_base = OTHER; note = N1-methylpseudouracil
  modified_base 77: mod_base = OTHER; note = N1-methylpseudouracil
  modified_base 91: mod_base = OTHER; note = N1-methylpseudouracil
  modified_base 108: mod_base = OTHER; note = N1-methylpseudouracil
  modified_base 109: mod_base = OTHER; note = N1-methylpseudouracil
  modified_base 126: mod_base = OTHER; note = N1-methylpseudouracil
  modified_base 133: mod_base = OTHER; note = N1-methylpseudouracil
  modified_base 135: mod_base = OTHER; note = N1-methylpseudouracil
  modified_base 142: mod_base = OTHER; note = N1-methylpseudouracil
  modified_base 148: mod_base = OTHER; note = N1-methylpseudouracil
  modified_base 149: mod_base = OTHER; note = N1-methylpseudouracil
  modified_base 152: mod_base = OTHER; note = N1-methylpseudouracil
  modified_base 163: mod_base = OTHER; note = N1-methylpseudouracil
  modified_base 164: mod_base = OTHER; note = N1-methylpseudouracil
  modified_base 169: mod_base = OTHER; note = N1-methylpseudouracil
  modified_base 175: mod_base = OTHER; note = N1-methylpseudouracil
  modified_base 176: mod_base = OTHER; note = N1-methylpseudouracil
  modified_base 185: mod_base = OTHER; note = N1-methylpseudouracil
  modified_base 191: mod_base = OTHER; note = N1-methylpseudouracil
  modified_base 214: mod_base = OTHER; note = N1-methylpseudouracil
  modified_base 227: mod_base = OTHER; note = N1-methylpseudouracil
  modified_base 246: mod_base = OTHER; note = N1-methylpseudouracil
  modified_base 251: mod_base = OTHER; note = N1-methylpseudouracil
  modified_base 254: mod_base = OTHER; note = N1-methylpseudouracil
  modified_base 256: mod_base = OTHER; note = N1-methylpseudouracil
  modified_base 265: mod_base = OTHER; note = N1-methylpseudouracil
  modified_base 269: mod_base = OTHER; note = N1-methylpseudouracil
  modified_base 275: mod_base = OTHER; note = N1-methylpseudouracil
  modified_base 284: mod_base = OTHER; note = N1-methylpseudouracil
  modified_base 287: mod_base = OTHER; note = N1-methylpseudouracil
  modified_base 302: mod_base = OTHER; note = N1-methylpseudouracil
  modified_base 307: mod_base = OTHER; note = N1-methylpseudouracil
  modified_base 324: mod_base = OTHER; note = N1-methylpseudouracil
  modified_base 329: mod_base = OTHER; note = N1-methylpseudouracil
  modified_base 344: mod_base = OTHER; note = N1-methylpseudouracil
  modified_base 346: mod_base = OTHER; note = N1-methylpseudouracil
  modified_base 347: mod_base = OTHER; note = N1-methylpseudouracil
  modified_base 350: mod_base = OTHER; note = N1-methylpseudouracil
  modified_base 353: mod_base = OTHER; note = N1-methylpseudouracil
  modified_base 367: mod_base = OTHER; note = N1-methylpseudouracil
  modified_base 374: mod_base = OTHER; note = N1-methylpseudouracil
  modified_base 376: mod_base = OTHER; note = N1-methylpseudouracil
  modified_base 379: mod_base = OTHER; note = N1-methylpseudouracil
  modified_base 380: mod_base = OTHER; note = N1-methylpseudouracil
  modified_base 389: mod_base = OTHER; note = N1-methylpseudouracil
  modified_base 392: mod_base = OTHER; note = N1-methylpseudouracil
  modified_base 394: mod_base = OTHER; note = N1-methylpseudouracil
  modified_base 401: mod_base = OTHER; note = N1-methylpseudouracil
  modified_base 405: mod_base = OTHER; note = N1-methylpseudouracil
  modified_base 410: mod_base = OTHER; note = N1-methylpseudouracil
  modified_base 419: mod_base = OTHER; note = N1-methylpseudouracil
  modified_base 421: mod_base = OTHER; note = N1-methylpseudouracil
  modified_base 422: mod_base = OTHER; note = N1-methylpseudouracil
  modified_base 437: mod_base = OTHER; note = N1-methylpseudouracil
  modified_base 455: mod_base = OTHER; note = N1-methylpseudouracil
  modified_base 458: mod_base = OTHER; note = N1-methylpseudouracil
  modified_base 464: mod_base = OTHER; note = N1-methylpseudouracil
  modified_base 467: mod_base = OTHER; note = N1-methylpseudouracil
  modified_base 476: mod_base = OTHER; note = N1-methylpseudouracil
  modified_base 485: mod_base = OTHER; note = N1-methylpseudouracil
  modified_base 487: mod_base = OTHER; note = N1-methylpseudouracil
  modified_base 491: mod_base = OTHER; note = N1-methylpseudouracil
  modified_base 494: mod_base = OTHER; note = N1-methylpseudouracil
  modified_base 497: mod_base = OTHER; note = N1-methylpseudouracil
  modified_base 503: mod_base = OTHER; note = N1-methylpseudouracil
  modified_base 506: mod_base = OTHER; note = N1-methylpseudouracil
  modified_base 509: mod_base = OTHER; note = N1-methylpseudouracil
  modified_base 517: mod_base = OTHER; note = N1-methylpseudouracil
  modified_base 518: mod_base = OTHER; note = N1-methylpseudouracil
  modified_base 522: mod_base = OTHER; note = N1-methylpseudouracil
  modified_base 524: mod_base = OTHER; note = N1-methylpseudouracil
  modified_base 527: mod_base = OTHER; note = N1-methylpseudouracil
  modified_base 536: mod_base = OTHER; note = N1-methylpseudouracil
  modified_base 545: mod_base = OTHER; note = N1-methylpseudouracil
  modified_base 550: mod_base = OTHER; note = N1-methylpseudouracil
  modified_base 551: mod_base = OTHER; note = N1-methylpseudouracil
  modified_base 559: mod_base = OTHER; note = N1-methylpseudouracil
  modified_base 560: mod_base = OTHER; note = N1-methylpseudouracil
  modified_base 568: mod_base = OTHER; note = N1-methylpseudouracil
  modified_base 572: mod_base = OTHER; note = N1-methylpseudouracil
  modified_base 583: mod_base = OTHER; note = N1-methylpseudouracil
  modified_base 589: mod_base = OTHER; note = N1-methylpseudouracil
  modified_base 590: mod_base = OTHER; note = N1-methylpseudouracil
  modified_base 595: mod_base = OTHER; note = N1-methylpseudouracil
  modified_base 599: mod_base = OTHER; note = N1-methylpseudouracil
  modified_base 604: mod_base = OTHER; note = N1-methylpseudouracil
  modified_base 605: mod_base = OTHER; note = N1-methylpseudouracil
  modified_base 611: mod_base = OTHER; note = N1-methylpseudouracil
  modified_base 614: mod_base = OTHER; note = N1-methylpseudouracil
  modified_base 626: mod_base = OTHER; note = N1-methylpseudouracil
  modified_base 632: mod_base = OTHER; note = N1-methylpseudouracil
  modified_base 635: mod_base = OTHER; note = N1-methylpseudouracil
  modified_base 644: mod_base = OTHER; note = N1-methylpseudouracil
  modified_base 650: mod_base = OTHER; note = N1-methylpseudouracil
  modified_base 654: mod_base = OTHER; note = N1-methylpseudouracil
  modified_base 655: mod_base = OTHER; note = N1-methylpseudouracil
  modified_base 670: mod_base = OTHER; note = N1-methylpseudouracil
  modified_base 682: mod_base = OTHER; note = N1-methylpseudouracil
  modified_base 683: mod_base = OTHER; note = N1-methylpseudouracil
  modified_base 704: mod_base = OTHER; note = N1-methylpseudouracil
  modified_base 707: mod_base = OTHER; note = N1-methylpseudouracil
  modified_base 710: mod_base = OTHER; note = N1-methylpseudouracil
  modified_base 715: mod_base = OTHER; note = N1-methylpseudouracil
  modified_base 734: mod_base = OTHER; note = N1-methylpseudouracil
  modified_base 737: mod_base = OTHER; note = N1-methylpseudouracil
  modified_base 743: mod_base = OTHER; note = N1-methylpseudouracil
  modified_base 746: mod_base = OTHER; note = N1-methylpseudouracil
  modified_base 754: mod_base = OTHER; note = N1-methylpseudouracil
  modified_base 758: mod_base = OTHER; note = N1-methylpseudouracil
  modified_base 776: mod_base = OTHER; note = N1-methylpseudouracil
  modified_base 790: mod_base = OTHER; note = N1-methylpseudouracil
  modified_base 791: mod_base = OTHER; note = N1-methylpseudouracil
  modified_base 796: mod_base = OTHER; note = N1-methylpseudouracil
  modified_base 797: mod_base = OTHER; note = N1-methylpseudouracil
  modified_base 799: mod_base = OTHER; note = N1-methylpseudouracil
  modified_base 809: mod_base = OTHER; note = N1-methylpseudouracil
  modified_base 821: mod_base = OTHER; note = N1-methylpseudouracil
  modified_base 833: mod_base = OTHER; note = N1-methylpseudouracil
  modified_base 844: mod_base = OTHER; note = N1-methylpseudouracil
  modified_base 845: mod_base = OTHER; note = N1-methylpseudouracil
  modified_base 848: mod_base = OTHER; note = N1-methylpseudouracil
  modified_base 854: mod_base = OTHER; note = N1-methylpseudouracil
  modified_base 871: mod_base = OTHER; note = N1-methylpseudouracil
  modified_base 893: mod_base = OTHER; note = N1-methylpseudouracil
  modified_base 901: mod_base = OTHER; note = N1-methylpseudouracil
  modified_base 902: mod_base = OTHER; note = N1-methylpseudouracil
  modified_base 920: mod_base = OTHER; note = N1-methylpseudouracil
  modified_base 923: mod_base = OTHER; note = N1-methylpseudouracil
  modified_base 926: mod_base = OTHER; note = N1-methylpseudouracil
  modified_base 932: mod_base = OTHER; note = N1-methylpseudouracil
  modified_base 934: mod_base = OTHER; note = N1-methylpseudouracil
  modified_base 935: mod_base = OTHER; note = N1-methylpseudouracil
  modified_base 959: mod_base = OTHER; note = N1-methylpseudouracil
  modified_base 962: mod_base = OTHER; note = N1-methylpseudouracil
  modified_base 964: mod_base = OTHER; note = N1-methylpseudouracil
  modified_base 983: mod_base = OTHER; note = N1-methylpseudouracil
  modified_base 988: mod_base = OTHER; note = N1-methylpseudouracil
  modified_base 998: mod_base = OTHER; note = N1-methylpseudouracil
  modified_base 1010: mod_base = OTHER; note = N1-methylpseudouracil
  modified_base 1013: mod_base = OTHER; note = N1-methylpseudouracil
  modified_base 1016: mod_base = OTHER; note = N1-methylpseudouracil
  modified_base 1018: mod_base = OTHER; note = N1-methylpseudouracil
  modified_base 1021: mod_base = OTHER; note = N1-methylpseudouracil
  modified_base 1022: mod_base = OTHER; note = N1-methylpseudouracil
  modified_base 1024: mod_base = OTHER; note = N1-methylpseudouracil
  modified_base 1042: mod_base = OTHER; note = N1-methylpseudouracil
  modified_base 1043: mod_base = OTHER; note = N1-methylpseudouracil
  modified_base 1049: mod_base = OTHER; note = N1-methylpseudouracil
  modified_base 1054: mod_base = OTHER; note = N1-methylpseudouracil
  modified_base 1055: mod_base = OTHER; note = N1-methylpseudouracil
  modified_base 1061: mod_base = OTHER; note = N1-methylpseudouracil
  modified_base 1064: mod_base = OTHER; note = N1-methylpseudouracil
  modified_base 1073: mod_base = OTHER; note = N1-methylpseudouracil
  modified_base 1076: mod_base = OTHER; note = N1-methylpseudouracil
  modified_base 1082: mod_base = OTHER; note = N1-methylpseudouracil
  modified_base 1091: mod_base = OTHER; note = N1-methylpseudouracil
  modified_base 1094: mod_base = OTHER; note = N1-methylpseudouracil
  modified_base 1102: mod_base = OTHER; note = N1-methylpseudouracil
  modified_base 1108: mod_base = OTHER; note = N1-methylpseudouracil
  modified_base 1118: mod_base = OTHER; note = N1-methylpseudouracil
  modified_base 1120: mod_base = OTHER; note = N1-methylpseudouracil
  modified_base 1124: mod_base = OTHER; note = N1-methylpseudouracil
  modified_base 1127: mod_base = OTHER; note = N1-methylpseudouracil
  modified_base 1136: mod_base = OTHER; note = N1-methylpseudouracil
  modified_base 1139: mod_base = OTHER; note = N1-methylpseudouracil
  modified_base 1144: mod_base = OTHER; note = N1-methylpseudouracil
  modified_base 1167: mod_base = OTHER; note = N1-methylpseudouracil
  modified_base 1168: mod_base = OTHER; note = N1-methylpseudouracil
  modified_base 1174: mod_base = OTHER; note = N1-methylpseudouracil
  modified_base 1180: mod_base = OTHER; note = N1-methylpseudouracil
  modified_base 1184: mod_base = OTHER; note = N1-methylpseudouracil
  modified_base 1196: mod_base = OTHER; note = N1-methylpseudouracil
  modified_base 1198: mod_base = OTHER; note = N1-methylpseudouracil
  modified_base 1207: mod_base = OTHER; note = N1-methylpseudouracil
  modified_base 1214: mod_base = OTHER; note = N1-methylpseudouracil
  modified_base 1216: mod_base = OTHER; note = N1-methylpseudouracil
  modified_base 1217: mod_base = OTHER; note = N1-methylpseudouracil
  modified_base 1220: mod_base = OTHER; note = N1-methylpseudouracil
  modified_base 1226: mod_base = OTHER; note = N1-methylpseudouracil
  modified_base 1228: mod_base = OTHER; note = N1-methylpseudouracil
  modified_base 1229: mod_base = OTHER; note = N1-methylpseudouracil
  modified_base 1235: mod_base = OTHER; note = N1-methylpseudouracil
  modified_base 1243: mod_base = OTHER; note = N1-methylpseudouracil
  modified_base 1247: mod_base = OTHER; note = N1-methylpseudouracil
  modified_base 1250: mod_base = OTHER; note = N1-methylpseudouracil
  modified_base 1254: mod_base = OTHER; note = N1-methylpseudouracil
  modified_base 1261: mod_base = OTHER; note = N1-methylpseudouracil
  modified_base 1265: mod_base = OTHER; note = N1-methylpseudouracil
  modified_base 1269: mod_base = OTHER; note = N1-methylpseudouracil
  modified_base 1274: mod_base = OTHER; note = N1-methylpseudouracil
  modified_base 1286: mod_base = OTHER; note = N1-methylpseudouracil
  modified_base 1294: mod_base = OTHER; note = N1-methylpseudouracil
  modified_base 1295: mod_base = OTHER; note = N1-methylpseudouracil
  modified_base 1298: mod_base = OTHER; note = N1-methylpseudouracil
  modified_base 1300: mod_base = OTHER; note = N1-methylpseudouracil
  modified_base 1312: mod_base = OTHER; note = N1-methylpseudouracil
  modified_base 1315: mod_base = OTHER; note = N1-methylpseudouracil
  modified_base 1327: mod_base = OTHER; note = N1-methylpseudouracil
  modified_base 1330: mod_base = OTHER; note = N1-methylpseudouracil
  modified_base 1331: mod_base = OTHER; note = N1-methylpseudouracil
  modified_base 1333: mod_base = OTHER; note = N1-methylpseudouracil
  modified_base 1336: mod_base = OTHER; note = N1-methylpseudouracil
  modified_base 1345: mod_base = OTHER; note = N1-methylpseudouracil
  modified_base 1364: mod_base = OTHER; note = N1-methylpseudouracil
  modified_base 1371: mod_base = OTHER; note = N1-methylpseudouracil
  modified_base 1376: mod_base = OTHER; note = N1-methylpseudouracil
  modified_base 1379: mod_base = OTHER; note = N1-methylpseudouracil
  modified_base 1385: mod_base = OTHER; note = N1-methylpseudouracil
  modified_base 1390: mod_base = OTHER; note = N1-methylpseudouracil
  modified_base 1396: mod_base = OTHER; note = N1-methylpseudouracil
  modified_base 1399: mod_base = OTHER; note = N1-methylpseudouracil
  modified_base 1402: mod_base = OTHER; note = N1-methylpseudouracil
  modified_base 1407: mod_base = OTHER; note = N1-methylpseudouracil
  modified_base 1414: mod_base = OTHER; note = N1-methylpseudouracil
  modified_base 1417: mod_base = OTHER; note = N1-methylpseudouracil
  modified_base 1426: mod_base = OTHER; note = N1-methylpseudouracil
  modified_base 1428: mod_base = OTHER; note = N1-methylpseudouracil
  modified_base 1430: mod_base = OTHER; note = N1-methylpseudouracil
  modified_base 1435: mod_base = OTHER; note = N1-methylpseudouracil
  modified_base 1437: mod_base = OTHER; note = N1-methylpseudouracil
  modified_base 1438: mod_base = OTHER; note = N1-methylpseudouracil
  modified_base 1446: mod_base = OTHER; note = N1-methylpseudouracil
  modified_base 1456: mod_base = OTHER; note = N1-methylpseudouracil
  modified_base 1459: mod_base = OTHER; note = N1-methylpseudouracil
  modified_base 1460: mod_base = OTHER; note = N1-methylpseudouracil
  modified_base 1463: mod_base = OTHER; note = N1-methylpseudouracil
  modified_base 1465: mod_base = OTHER; note = N1-methylpseudouracil
  modified_base 1473: mod_base = OTHER; note = N1-methylpseudouracil
  modified_base 1474: mod_base = OTHER; note = N1-methylpseudouracil
  modified_base 1477: mod_base = OTHER; note = N1-methylpseudouracil
  modified_base 1485: mod_base = OTHER; note = N1-methylpseudouracil
  modified_base 1488: mod_base = OTHER; note = N1-methylpseudouracil
  modified_base 1490: mod_base = OTHER; note = N1-methylpseudouracil
  modified_base 1491: mod_base = OTHER; note = N1-methylpseudouracil
  modified_base 1492: mod_base = OTHER; note = N1-methylpseudouracil
  modified_base 1496: mod_base = OTHER; note = N1-methylpseudouracil
  modified_base 1501: mod_base = OTHER; note = N1-methylpseudouracil
  modified_base 1503: mod_base = OTHER; note = N1-methylpseudouracil
  modified_base 1507: mod_base = OTHER; note = N1-methylpseudouracil
ggaaatcgcaaaatttgctcttcgcgttagatttcttttagttttctcgcaactagcaagctttttgttctcgccatgggcagcagcaagtccaagcccaaggacccttcccagagaaggaggggtggcggctctagcggctgccccttcctgggcaacaacttcggctacaccttcaagaagctgcccgtggagggcagcgaggaggacaagtcccagaccggcgtgaaccgggccagcaagggtggcctgatctacggcaactacctgcacctggagaaggtgctgaacgcccaggagctgcagtccgagaccaagggcaataagatccacgacgagcacctgttcatcatcacccaccaggcctacgagctgtggttcaagcagatcctgtgggagctggatagcgtgagggagatcttccagaacggccacgtgcgggacgagcgcaacatgctgaaggtggtgagccggatgcaccgggtgtccgtgatcctgaagctgctggtgcagcagttcagtatcctggagaccatgaccgccctggacttcaacgacttccgggagtacctgagcccagcctccgggttccagtccctgcagttcagactgctggagaacaagatcggggtgctgcagaacatgcgggtgccttacaaccggcggcactaccgggacaacttcaagggcgaggagaacgagctgctgctgaagtccgagcaggagaagaccctgctggagctggtggaggcctggctggagcggacacccgggctggagccacacgggttcaacttctggggcaagctggagaagaacatcaccagaggcctggaggaggagttcatccgcatccaggccaaggaagagtccgaggagaaggaggagcaggtggccgagttccagaagcagaaggaggtgctgctgagcctgttcgacgagaagaggcacgagcacctgctgtccaagggcgagaggcggctgagctacagagccctacagggcgccctgatgatctacttctacagggaggagccccgcttccaggtgcccttccagctgctgaccagcctgatggacatcgacagcctgatgaccaagtggcggtacaaccacgtgtgcatggtgcaccggatgctgggctccaaagccggaacgggcggcagttccggctaccactacctgcggagcaccgtgtccgaccggtacaaggtgttcgtggacctgttcaacctgagcacctacctgatccctcggcactggatccctaagatgaaccccaccatccacaagttcctgtacaccgccgagtactgcgacagcagctacttctcctccgacgagtccgacggcggaaagcccatccccaatcccctgctgggcctggactccacctaatagtaagctggagcctcctgagagacctgtgtgaactattgagaagatcggaacagctccttactctgaggaagttggtacccccgtggtctttgaataaagtctgagtgggcggc

SEQ ID NO: 327 - RNA, 1514 nt, synthetic construct
  source 1..1514: mol_type = other RNA
  modified_base 6: mod_base = OTHER; note = N1-methylpseudouracil
  modified_base 14: mod_base = OTHER; note = N1-methylpseudouracil
  modified_base 15: mod_base = OTHER; note = N1-methylpseudouracil
  modified_base 16: mod_base = OTHER; note = N1-methylpseudouracil
  modified_base 19: mod_base = OTHER; note = N1-methylpseudouracil
  modified_base 21: mod_base = OTHER; note = N1-methylpseudouracil
  modified_base 22: mod_base = OTHER; note = N1-methylpseudouracil
  modified_base 27: mod_base = OTHER; note = N1-methylpseudouracil
  modified_base 28: mod_base = OTHER; note = N1-methylpseudouracil
  modified_base 32: mod_base = OTHER; note = N1-methylpseudouracil
  modified_base 33: mod_base = OTHER; note = N1-methylpseudouracil
  modified_base 34: mod_base = OTHER; note = N1-methylpseudouracil
  modified_base 36: mod_base = OTHER; note = N1-methylpseudouracil
  modified_base 37: mod_base = OTHER; note = N1-methylpseudouracil
  modified_base 38: mod_base = OTHER; note = N1-methylpseudouracil
  modified_base 39: mod_base = OTHER; note = N1-methylpseudouracil
  modified_base 42: mod_base = OTHER; note = N1-methylpseudouracil
  modified_base 43: mod_base = OTHER; note = N1-methylpseudouracil
  modified_base 44: mod_base = OTHER; note = N1-methylpseudouracil
  modified_base 45: mod_base = OTHER; note = N1-methylpseudouracil
  modified_base 47: mod_base = OTHER; note = N1-methylpseudouracil
  modified_base 54: mod_base = OTHER; note = N1-methylpseudouracil
  modified_base 62: mod_base = OTHER; note = N1-methylpseudouracil
  modified_base 63: mod_base = OTHER; note = N1-methylpseudouracil
  modified_base 64: mod_base = OTHER; note = N1-methylpseudouracil
  modified_base 65: mod_base = OTHER; note = N1-methylpseudouracil
  modified_base 66: mod_base = OTHER; note = N1-methylpseudouracil
  modified_base 68: mod_base = OTHER; note = N1-methylpseudouracil
  modified_base 69: mod_base = OTHER; note = N1-methylpseudouracil
  modified_base 71: mod_base = OTHER; note = N1-methylpseudouracil
  modified_base 77: mod_base = OTHER; note = N1-methylpseudouracil
  modified_base 82: mod_base = OTHER; note = N1-methylpseudouracil
  modified_base 84: mod_base = OTHER; note = N1-methylpseudouracil
  modified_base 85: mod_base = OTHER; note = N1-methylpseudouracil
  modified_base 87: mod_base = OTHER; note = N1-methylpseudouracil
  modified_base 91: mod_base = OTHER; note = N1-methylpseudouracil
  modified_base 93: mod_base = OTHER; note = N1-methylpseudouracil
  modified_base 99: mod_base = OTHER; note = N1-methylpseudouracil
  modified_base 105: mod_base = OTHER; note = N1-methylpseudouracil
  modified_base 108: mod_base = OTHER; note = N1-methylpseudouracil
  modified_base 109: mod_base = OTHER; note = N1-methylpseudouracil
  modified_base 111: mod_base = OTHER; note = N1-methylpseudouracil
  modified_base 133: mod_base = OTHER; note = N1-methylpseudouracil
  modified_base 135: mod_base = OTHER; note = N1-methylpseudouracil
  modified_base 136: mod_base = OTHER; note = N1-methylpseudouracil
  modified_base 138: mod_base = OTHER; note = N1-methylpseudouracil
  modified_base 142: mod_base = OTHER; note = N1-methylpseudouracil
  modified_base 144: mod_base = OTHER; note = N1-methylpseudouracil
  modified_base 147: mod_base = OTHER; note = N1-methylpseudouracil
  modified_base 148: mod_base = OTHER; note = N1-methylpseudouracil
  modified_base 149: mod_base = OTHER; note = N1-methylpseudouracil
  modified_base 150: mod_base = OTHER; note = N1-methylpseudouracil
  modified_base 152: mod_base = OTHER; note = N1-methylpseudouracil
  modified_base 153: mod_base = OTHER; note = N1-methylpseudouracil
  modified_base 159: mod_base = OTHER; note = N1-methylpseudouracil
  modified_base 162: mod_base = OTHER; note = N1-methylpseudouracil
  modified_base 163: mod_base = OTHER; note = N1-methylpseudouracil
  modified_base 164: mod_base = OTHER; note = N1-methylpseudouracil
  modified_base 165: mod_base = OTHER; note = N1-methylpseudouracil
  modified_base 169: mod_base = OTHER; note = N1-methylpseudouracil
  modified_base 171: mod_base = OTHER; note = N1-methylpseudouracil
  modified_base 175: mod_base = OTHER; note = N1-methylpseudouracil
  modified_base 176: mod_base = OTHER; note = N1-methylpseudouracil
  modified_base 177: mod_base = OTHER; note = N1-methylpseudouracil
  modified_base 185: mod_base = OTHER; note = N1-methylpseudouracil
  modified_base 186: mod_base = OTHER; note = N1-methylpseudouracil
  modified_base 189: mod_base = OTHER; note = N1-methylpseudouracil
  modified_base 191: mod_base = OTHER; note = N1-methylpseudouracil
  modified_base 192: mod_base = OTHER; note = N1-methylpseudouracil
  modified_base 199: mod_base = OTHER; note = N1-methylpseudouracil
  modified_base 201: mod_base = OTHER; note = N1-methylpseudouracil
  modified_base 214: mod_base = OTHER; note = N1-methylpseudouracil
  modified_base 227: mod_base = OTHER; note = N1-methylpseudouracil
  modified_base 246: mod_base = OTHER; note = N1-methylpseudouracil
  modified_base 251: mod_base = OTHER; note = N1-methylpseudouracil
  modified_base 254: mod_base = OTHER; note = N1-methylpseudouracil
  modified_base 256: mod_base = OTHER; note = N1-methylpseudouracil
  modified_base 265: mod_base = OTHER; note = N1-methylpseudouracil
  modified_base 269: mod_base = OTHER; note = N1-methylpseudouracil
  modified_base 275: mod_base = OTHER; note = N1-methylpseudouracil
  modified_base 284: mod_base = OTHER; note = N1-methylpseudouracil
  modified_base 287: mod_base = OTHER; note = N1-methylpseudouracil
  modified_base 302: mod_base = OTHER; note = N1-methylpseudouracil
  modified_base 307: mod_base = OTHER; note = N1-methylpseudouracil
  modified_base 324: mod_base = OTHER; note = N1-methylpseudouracil
  modified_base 329: mod_base = OTHER; note = N1-methylpseudouracil
  modified_base 344: mod_base = OTHER; note = N1-methylpseudouracil
  modified_base 346: mod_base = OTHER; note = N1-methylpseudouracil
  modified_base 347: mod_base = OTHER; note = N1-methylpseudouracil
  modified_base 350: mod_base = OTHER; note = N1-methylpseudouracil
  modified_base 353: mod_base = OTHER; note = N1-methylpseudouracil
  modified_base 367: mod_base = OTHER; note = N1-methylpseudouracil
  modified_base 374: mod_base = OTHER; note = N1-methylpseudouracil
  modified_base 376: mod_base = OTHER; note = N1-methylpseudouracil
  modified_base 379: mod_base = OTHER; note = N1-methylpseudouracil
  modified_base 380: mod_base = OTHER; note = N1-methylpseudouracil
  modified_base 389: mod_base = OTHER; note = N1-methylpseudouracil
  modified_base 392: mod_base = OTHER; note = N1-methylpseudouracil
  modified_base 394: mod_base = OTHER; note = N1-methylpseudouracil
  modified_base 401: mod_base = OTHER; note = N1-methylpseudouracil
  modified_base 405: mod_base = OTHER; note = N1-methylpseudouracil
  modified_base 410: mod_base = OTHER; note = N1-methylpseudouracil
  modified_base 419: mod_base = OTHER; note = N1-methylpseudouracil
  modified_base 421: mod_base = OTHER; note = N1-methylpseudouracil
  modified_base 422: mod_base = OTHER; note = N1-methylpseudouracil
  modified_base 437: mod_base = OTHER; note = N1-methylpseudouracil
  modified_base 455: mod_base = OTHER; note = N1-methylpseudouracil
  modified_base 458: mod_base = OTHER; note = N1-methylpseudouracil
  modified_base 464: mod_base = OTHER; note = N1-methylpseudouracil
  modified_base 467: mod_base = OTHER; note = N1-methylpseudouracil
  modified_base 476: mod_base = OTHER; note = N1-methylpseudouracil
  modified_base 485: mod_base = OTHER; note = N1-methylpseudouracil
  modified_base 487: mod_base = OTHER; note = N1-methylpseudouracil
  modified_base 491: mod_base = OTHER; note = N1-methylpseudouracil
  modified_base 494: mod_base = OTHER; note = N1-methylpseudouracil
  modified_base 497: mod_base = OTHER; note = N1-methylpseudouracil
  modified_base 503: mod_base = OTHER; note = N1-methylpseudouracil
  modified_base 506: mod_base = OTHER; note = N1-methylpseudouracil
  modified_base 509: mod_base = OTHER; note = N1-methylpseudouracil
  modified_base 517: mod_base = OTHER; note = N1-methylpseudouracil
  modified_base 518: mod_base = OTHER; note = N1-methylpseudouracil
  modified_base 522: mod_base = OTHER; note = N1-methylpseudouracil
  modified_base 524: mod_base = OTHER; note = N1-methylpseudouracil
  modified_base 527: mod_base = OTHER; note = N1-methylpseudouracil
  modified_base 536: mod_base = OTHER; note = N1-methylpseudouracil
  modified_base 545: mod_base = OTHER; note = N1-methylpseudouracil
  modified_base 550: mod_base = OTHER; note = N1-methylpseudouracil
  modified_base 551: mod_base = OTHER; note = N1-methylpseudouracil
  modified_base 559: mod_base = OTHER; note = N1-methylpseudouracil
  modified_base 560: mod_base = OTHER; note = N1-methylpseudouracil
  modified_base 568: mod_base = OTHER; note = N1-methylpseudouracil
  modified_base 572: mod_base = OTHER; note = N1-methylpseudouracil
  modified_base 583: mod_base = OTHER; note = N1-methylpseudouracil
  modified_base 589: mod_base = OTHER; note = N1-methylpseudouracil
  modified_base 590: mod_base = OTHER; note = N1-methylpseudouracil
  modified_base 595: mod_base = OTHER; note = N1-methylpseudouracil
  modified_base 599: mod_base = OTHER; note = N1-methylpseudouracil
  modified_base 604: mod_base = OTHER; note = N1-methylpseudouracil
  modified_base 605: mod_base = OTHER; note = N1-methylpseudouracil
  modified_base 611: mod_base = OTHER; note = N1-methylpseudouracil
  modified_base 614: mod_base = OTHER; note = N1-methylpseudouracil
  modified_base 626: mod_base = OTHER; note = N1-methylpseudouracil
  modified_base 632: mod_base = OTHER; note = N1-methylpseudouracil
  modified_base 635: mod_base = OTHER; note = N1-methylpseudouracil
  modified_base 644: mod_base = OTHER; note = N1-methylpseudouracil
  modified_base 650: mod_base = OTHER; note = N1-methylpseudouracil
  modified_base 654: mod_base = OTHER; note = N1-methylpseudouracil
  modified_base 655: mod_base = OTHER; note = N1-methylpseudouracil
  modified_base 670: mod_base = OTHER; note = N1-methylpseudouracil
  modified_base 682: mod_base = OTHER; note = N1-methylpseudouracil
  modified_base 683: mod_base = OTHER; note = N1-methylpseudouracil
  modified_base 704: mod_base = OTHER; note = N1-methylpseudouracil
  modified_base 707: mod_base = OTHER; note = N1-methylpseudouracil
  modified_base 710: mod_base = OTHER; note = N1-methylpseudouracil
  modified_base 715: mod_base = OTHER; note = N1-methylpseudouracil
  modified_base 734: mod_base = OTHER; note = N1-methylpseudouracil
  modified_base 737: mod_base = OTHER; note = N1-methylpseudouracil
  modified_base 743: mod_base = OTHER; note = N1-methylpseudouracil
  modified_base 746: mod_base = OTHER; note = N1-methylpseudouracil
  modified_base 754: mod_base = OTHER; note = N1-methylpseudouracil
  modified_base 758: mod_base = OTHER; note = N1-methylpseudouracil
  modified_base 776: mod_base = OTHER; note = N1-methylpseudouracil
  modified_base 790: mod_base = OTHER; note = N1-methylpseudouracil
  modified_base 791: mod_base = OTHER; note = N1-methylpseudouracil
  modified_base 796: mod_base = OTHER; note = N1-methylpseudouracil
  modified_base 797: mod_base = OTHER; note = N1-methylpseudouracil
  modified_base 799: mod_base = OTHER; note = N1-methylpseudouracil
  modified_base 809: mod_base = OTHER; note = N1-methylpseudouracil
  modified_base 821: mod_base = OTHER; note = N1-methylpseudouracil
  modified_base 833: mod_base = OTHER; note = N1-methylpseudouracil
  modified_base 844: mod_base = OTHER; note = N1-methylpseudouracil
  modified_base 845: mod_base = OTHER; note = N1-methylpseudouracil
  modified_base 848: mod_base = OTHER; note = N1-methylpseudouracil
  modified_base 854: mod_base = OTHER; note = N1-methylpseudouracil
  modified_base 871: mod_base = OTHER; note = N1-methylpseudouracil
  modified_base 893: mod_base = OTHER; note = N1-methylpseudouracil
  modified_base 901: mod_base = OTHER; note = N1-methylpseudouracil
  modified_base 902: mod_base = OTHER; note = N1-methylpseudouracil
  modified_base 920: mod_base = OTHER; note = N1-methylpseudouracil
  modified_base 923: mod_base = OTHER; note = N1-methylpseudouracil
  modified_base 926: mod_base = OTHER; note = N1-methylpseudouracil
  modified_base 932: mod_base = OTHER; note = N1-methylpseudouracil
  modified_base 934: mod_base = OTHER; note = N1-methylpseudouracil
  modified_base 935: mod_base = OTHER; note = N1-methylpseudouracil
  modified_base 959: mod_base = OTHER; note = N1-methylpseudouracil
  modified_base 962: mod_base = OTHER; note = N1-methylpseudouracil
  modified_base 964: mod_base = OTHER; note = N1-methylpseudouracil
  modified_base 983: mod_base = OTHER; note = N1-methylpseudouracil
  modified_base 988: mod_base = OTHER; note = N1-methylpseudouracil
  modified_base 998: mod_base = OTHER; note = N1-methylpseudouracil
  modified_base 1010: mod_base = OTHER; note = N1-methylpseudouracil
  modified_base 1013: mod_base = OTHER; note = N1-methylpseudouracil
  modified_base 1016: mod_base = OTHER; note = N1-methylpseudouracil
  modified_base 1018: mod_base = OTHER; note = N1-methylpseudouracil
  modified_base 1021: mod_base = OTHER; note = N1-methylpseudouracil
  modified_base 1022: mod_base = OTHER; note = N1-methylpseudouracil
  modified_base 1024: mod_base = OTHER; note = N1-methylpseudouracil
  modified_base 1042: mod_base = OTHER; note = N1-methylpseudouracil
  modified_base 1043: mod_base = OTHER; note = N1-methylpseudouracil
  modified_base 1049: mod_base = OTHER; note = N1-methylpseudouracil
  modified_base 1054: mod_base = OTHER; note = N1-methylpseudouracil
  modified_base 1055: mod_base = OTHER; note = N1-methylpseudouracil
  modified_base 1061: mod_base = OTHER; note = N1-methylpseudouracil
  modified_base 1064: mod_base = OTHER; note = N1-methylpseudouracil
  modified_base 1073: mod_base = OTHER; note = N1-methylpseudouracil
  modified_base 1076: mod_base = OTHER; note = N1-methylpseudouracil
  modified_base 1082: mod_base = OTHER; note = N1-methylpseudouracil
  modified_base 1091: mod_base = OTHER; note = N1-methylpseudouracil
  modified_base 1094: mod_base = OTHER; note = N1-methylpseudouracil
  modified_base 1102: mod_base = OTHER; note = N1-methylpseudouracil
  modified_base 1108: mod_base = OTHER; note = N1-methylpseudouracil
  modified_base 1118: mod_base = OTHER; note = N1-methylpseudouracil
  modified_base 1120: mod_base = OTHER; note = N1-methylpseudouracil
  modified_base 1124: mod_base = OTHER; note = N1-methylpseudouracil
  modified_base 1127: mod_base = OTHER; note = N1-methylpseudouracil
  modified_base 1136: mod_base = OTHER; note = N1-methylpseudouracil
  modified_base 1139: mod_base = OTHER; note = N1-methylpseudouracil
  modified_base 1144: mod_base = OTHER; note = N1-methylpseudouracil
  modified_base 1167: mod_base = OTHER; note = N1-methylpseudouracil
  modified_base 1168: mod_base = OTHER; note = N1-methylpseudouracil
  modified_base 1174: mod_base = OTHER; note = N1-methylpseudouracil
  modified_base 1180: mod_base = OTHER; note = N1-methylpseudouracil
  modified_base 1184: mod_base = OTHER; note = N1-methylpseudouracil
  modified_base 1196: mod_base = OTHER; note = N1-methylpseudouracil
  modified_base 1198: mod_base = OTHER; note = N1-methylpseudouracil
  modified_base 1207: mod_base = OTHER; note = N1-methylpseudouracil
  modified_base 1214: mod_base = OTHER; note = N1-methylpseudouracil
  modified_base 1216: mod_base = OTHER; note = N1-methylpseudouracil
  modified_base 1217: mod_base = OTHER; note = N1-methylpseudouracil
  modified_base 1220: mod_base = OTHER; note = N1-methylpseudouracil
  modified_base 1226: mod_base = OTHER; note = N1-methylpseudouracil
  modified_base 1228: mod_base = OTHER; note = N1-methylpseudouracil
  modified_base 1229: mod_base = OTHER; note = N1-methylpseudouracil
  modified_base 1235: mod_base = OTHER; note = N1-methylpseudouracil
  modified_base 1243: mod_base = OTHER; note = N1-methylpseudouracil
  modified_base 1247: mod_base = OTHER; note = N1-methylpseudouracil
  modified_base 1250: mod_base = OTHER; note = N1-methylpseudouracil
  modified_base 1254: mod_base = OTHER; note = N1-methylpseudouracil
  modified_base 1261: mod_base = OTHER; note = N1-methylpseudouracil
  modified_base 1265: mod_base = OTHER; note = N1-methylpseudouracil
  modified_base 1269: mod_base = OTHER; note = N1-methylpseudouracil
  modified_base 1274: mod_base = OTHER; note = N1-methylpseudouracil
  modified_base 1286: mod_base = OTHER; note = N1-methylpseudouracil
  modified_base 1294: mod_base = OTHER; note = N1-methylpseudouracil
  modified_base 1295: mod_base = OTHER; note = N1-methylpseudouracil
  modified_base 1298: mod_base = OTHER; note = N1-methylpseudouracil
  modified_base 1300: mod_base = OTHER; note = N1-methylpseudouracil
  modified_base 1312: mod_base = OTHER; note = N1-methylpseudouracil
  modified_base 1315: mod_base = OTHER; note = N1-methylpseudouracil
  modified_base 1327: mod_base = OTHER; note = N1-methylpseudouracil
  modified_base 1330: mod_base = OTHER; note = N1-methylpseudouracil
  modified_base 1331: mod_base = OTHER; note = N1-methylpseudouracil
  modified_base 1333: mod_base = OTHER; note = N1-methylpseudouracil
  modified_base 1336: mod_base = OTHER; note = N1-methylpseudouracil
  modified_base 1345: mod_base = OTHER; note = N1-methylpseudouracil
  modified_base 1364: mod_base = OTHER; note = N1-methylpseudouracil
  modified_base 1371: mod_base = OTHER; note = N1-methylpseudouracil
  modified_base 1376: mod_base = OTHER; note = N1-methylpseudouracil
  modified_base 1379: mod_base = OTHER; note = N1-methylpseudouracil
  modified_base 1385: mod_base = OTHER; note = N1-methylpseudouracil
  modified_base 1390: mod_base = OTHER; note = N1-methylpseudouracil
  modified_base 1396: mod_base = OTHER; note = N1-methylpseudouracil
  modified_base 1399: mod_base = OTHER; note = N1-methylpseudouracil
  modified_base 1402: mod_base = OTHER; note = N1-methylpseudouracil
  modified_base 1407: mod_base = OTHER; note = N1-methylpseudouracil
  modified_base 1414: mod_base = OTHER; note = N1-methylpseudouracil
  modified_base 1418: mod_base = OTHER; note = N1-methylpseudouracil
  modified_base 1423: mod_base = OTHER; note = N1-methylpseudouracil
  modified_base 1427: mod_base = OTHER; note = N1-methylpseudouracil
  modified_base 1428: mod_base = OTHER; note = N1-methylpseudouracil
  modified_base 1430: mod_base = OTHER; note = N1-methylpseudouracil
  modified_base 1431: mod_base = OTHER; note = N1-methylpseudouracil
  modified_base 1437: mod_base = OTHER; note = N1-methylpseudouracil
  modified_base 1438: mod_base = OTHER; note = N1-methylpseudouracil
  modified_base 1444: mod_base = OTHER; note = N1-methylpseudouracil
  modified_base 1457: mod_base = OTHER; note = N1-methylpseudouracil
  modified_base 1460: mod_base = OTHER; note = N1-methylpseudouracil
  modified_base 1465: mod_base = OTHER; note = N1-methylpseudouracil
  modified_base 1466: mod_base = OTHER; note = N1-methylpseudouracil
  modified_base 1469: mod_base = OTHER; note = N1-methylpseudouracil
  modified_base 1477: mod_base = OTHER; note = N1-methylpseudouracil
  modified_base 1485: mod_base = OTHER; note = N1-methylpseudouracil
  modified_base 1488: mod_base = OTHER; note = N1-methylpseudouracil
  modified_base 1490: mod_base = OTHER; note = N1-methylpseudouracil
  modified_base 1491: mod_base = OTHER; note = N1-methylpseudouracil
  modified_base 1492: mod_base = OTHER; note = N1-methylpseudouracil
  modified_base 1496: mod_base = OTHER; note = N1-methylpseudouracil
  modified_base 1501: mod_base = OTHER; note = N1-methylpseudouracil
  modified_base 1503: mod_base = OTHER; note = N1-methylpseudouracil
  modified_base 1507: mod_base = OTHER; note = N1-methylpseudouracil
ggaaatcgcaaaatttgctcttcgcgttagatttcttttagttttctcgcaactagcaagctttttgttctcgccatgggatcttctaaatctaaacctaaagatccttctcaaagaagaagaggaggaggatcttctggatgtccttttcttggaaataattttggatatacatttaagaaacttcctgttgaaggatctgaagaagacaagtcccagaccggcgtgaaccgggccagcaagggtggcctgatctacggcaactacctgcacctggagaaggtgctgaacgcccaggagctgcagtccgagaccaagggcaataagatccacgacgagcacctgttcatcatcacccaccaggcctacgagctgtggttcaagcagatcctgtgggagctggatagcgtgagggagatcttccagaacggccacgtgcgggacgagcgcaacatgctgaaggtggtgagccggatgcaccgggtgtccgtgatcctgaagctgctggtgcagcagttcagtatcctggagaccatgaccgccctggacttcaacgacttccgggagtacctgagcccagcctccgggttccagtccctgcagttcagactgctggagaacaagatcggggtgctgcagaacatgcgggtgccttacaaccggcggcactaccgggacaacttcaagggcgaggagaacgagctgctgctgaagtccgagcaggagaagaccctgctggagctggtggaggcctggctggagcggacacccgggctggagccacacgggttcaacttctggggcaagctggagaagaacatcaccagaggcctggaggaggagttcatccgcatccaggccaaggaagagtccgaggagaaggaggagcaggtggccgagttccagaagcagaaggaggtgctgctgagcctgttcgacgagaagaggcacgagcacctgctgtccaagggcgagaggcggctgagctacagagccctacagggcgccctgatgatctacttctacagggaggagccccgcttccaggtgcccttccagctgctgaccagcctgatggacatcgacagcctgatgaccaagtggcggtacaaccacgtgtgcatggtgcaccggatgctgggctccaaagccggaacgggcggcagttccggctaccactacctgcggagcaccgtgtccgaccggtacaaggtgttcgtggacctgttcaacctgagcacctacctgatccctcggcactggatccctaagatgaaccccaccatccacaagttcctgtacaccgccgagtactgcgacagcagctacttctcctccgacgagtccgacggcggaaagcccatccccaatcccctgctgggcctggactccacctgataataggctggagcctcggtggcctagcttcttgccccttgggcctccccccagcccctcctccccttcctgcacccgtacccccgtggtctttgaataaagtctgagtgggcggc

SEQ ID NO: 328 - RNA, 1485 nt, synthetic construct; identical to SEQ ID NO: 320
  source 1..1485: mol_type = other RNA
  modified_base 6: mod_base = OTHER; note = N1-methylpseudouracil
  modified_base 24: mod_base = OTHER; note = N1-methylpseudouracil
  modified_base 34: mod_base = OTHER; note = N1-methylpseudouracil
  modified_base 36: mod_base = OTHER; note = N1-methylpseudouracil
  modified_base 48: mod_base = OTHER; note = N1-methylpseudouracil
  modified_base 70: mod_base = OTHER; note = N1-methylpseudouracil
  modified_base 79: mod_base = OTHER; note = N1-methylpseudouracil
  modified_base 104: mod_base = OTHER; note = N1-methylpseudouracil
  modified_base 107: mod_base = OTHER; note = N1-methylpseudouracil
  modified_base 113: mod_base = OTHER; note = N1-methylpseudouracil
  modified_base 118: mod_base = OTHER; note = N1-methylpseudouracil
  modified_base 119: mod_base = OTHER; note = N1-methylpseudouracil
  modified_base 120: mod_base = OTHER; note = N1-methylpseudouracil
  modified_base 123: mod_base = OTHER; note = N1-methylpseudouracil
  modified_base 134: mod_base = OTHER; note = N1-methylpseudouracil
  modified_base 135: mod_base = OTHER; note = N1-methylpseudouracil
  modified_base 140: mod_base = OTHER; note = N1-methylpseudouracil
  modified_base 146: mod_base = OTHER; note = N1-methylpseudouracil
  modified_base 147: mod_base = OTHER; note = N1-methylpseudouracil
  modified_base 156: mod_base = OTHER; note = N1-methylpseudouracil
  modified_base 160: mod_base = OTHER; note = N1-methylpseudouracil
  modified_base 162: mod_base = OTHER; note = N1-methylpseudouracil
  modified_base 198: mod_base = OTHER; note = N1-methylpseudouracil
  modified_base 222: mod_base = OTHER; note = N1-methylpseudouracil
  modified_base 225: mod_base = OTHER; note = N1-methylpseudouracil
  modified_base 227: mod_base = OTHER; note = N1-methylpseudouracil
  modified_base 236: mod_base = OTHER; note = N1-methylpseudouracil
  modified_base 240: mod_base = OTHER; note = N1-methylpseudouracil
  modified_base 246: mod_base = OTHER; note = N1-methylpseudouracil
  modified_base 255: mod_base = OTHER; note = N1-methylpseudouracil
  modified_base 258: mod_base = OTHER; note = N1-methylpseudouracil
  modified_base 273: mod_base = OTHER; note = N1-methylpseudouracil
  modified_base 286: mod_base = OTHER; note = N1-methylpseudouracil
  modified_base 292: mod_base = OTHER; note = N1-methylpseudouracil
  modified_base 300: mod_base = OTHER; note = N1-methylpseudouracil
  modified_base 315: mod_base = OTHER; note = N1-methylpseudouracil
  modified_base 317: mod_base = OTHER; note = N1-methylpseudouracil
  modified_base 318: mod_base = OTHER; note = N1-methylpseudouracil
  modified_base 321: mod_base = OTHER; note = N1-methylpseudouracil
  modified_base 324: mod_base = OTHER; note = N1-methylpseudouracil
  modified_base 338: mod_base = OTHER; note = N1-methylpseudouracil
  modified_base 345: mod_base = OTHER; note = N1-methylpseudouracil
  modified_base 347: mod_base = OTHER; note = N1-methylpseudouracil
  modified_base 350: mod_base = OTHER; note = N1-methylpseudouracil
  modified_base 351: mod_base = OTHER; note = N1-methylpseudouracil
  modified_base 360: mod_base = OTHER; note = N1-methylpseudouracil
  modified_base 363: mod_base = OTHER; note = N1-methylpseudouracil
  modified_base 365: mod_base = OTHER; note = N1-methylpseudouracil
  modified_base 372: mod_base = OTHER; note = N1-methylpseudouracil
  modified_base 381: mod_base = OTHER; note = N1-methylpseudouracil
  modified_base 390: mod_base = OTHER; note = N1-methylpseudouracil
  modified_base 392: mod_base = OTHER; note = N1-methylpseudouracil
  modified_base 393: mod_base = OTHER; note = N1-methylpseudouracil
  modified_base 408: mod_base = OTHER; note = N1-methylpseudouracil
  modified_base 426: mod_base = OTHER; note = N1-methylpseudouracil
  modified_base 429: mod_base = OTHER; note = N1-methylpseudouracil
  modified_base 435: mod_base = OTHER; note = N1-methylpseudouracil
  modified_base 438: mod_base = OTHER; note = N1-methylpseudouracil
  modified_base 447: mod_base = OTHER; note = N1-methylpseudouracil
  modified_base 456: mod_base = OTHER; note = N1-methylpseudouracil
  modified_base 462: mod_base = OTHER; note = N1-methylpseudouracil
  modified_base 465: mod_base = OTHER; note = N1-methylpseudouracil
  modified_base 468: mod_base = OTHER; note = N1-methylpseudouracil
  modified_base 474: mod_base = OTHER; note = N1-methylpseudouracil
  modified_base 477: mod_base = OTHER; note = N1-methylpseudouracil
  modified_base 480: mod_base = OTHER; note = N1-methylpseudouracil
  modified_base 488: mod_base = OTHER; note = N1-methylpseudouracil
  modified_base 489: mod_base = OTHER; note = N1-methylpseudouracil
  modified_base 495: mod_base = OTHER; note = N1-methylpseudouracil
  modified_base 498: mod_base = OTHER; note = N1-methylpseudouracil
  modified_base 507: mod_base = OTHER; note = N1-methylpseudouracil
  modified_base 516: mod_base = OTHER; note = N1-methylpseudouracil
  modified_base 521: mod_base = OTHER; note = N1-methylpseudouracil
  modified_base 522: mod_base = OTHER; note = N1-methylpseudouracil
  modified_base 530: mod_base = OTHER; note = N1-methylpseudouracil
  modified_base 531: mod_base = OTHER; note = N1-methylpseudouracil
  modified_base 539: mod_base = OTHER; note = N1-methylpseudouracil
  modified_base 543: mod_base = OTHER; note = N1-methylpseudouracil
  modified_base 550: mod_base = OTHER; note = N1-methylpseudouracil
  modified_base 560: mod_base = OTHER; note = N1-methylpseudouracil
  modified_base 561: mod_base = OTHER; note = N1-methylpseudouracil
  modified_base 570: mod_base = OTHER; note = N1-methylpseudouracil
  modified_base 571: mod_base = OTHER; note = N1-methylpseudouracil
  modified_base 575: mod_base = OTHER; note = N1-methylpseudouracil
  modified_base 576: mod_base = OTHER; note = N1-methylpseudouracil
  modified_base 582: mod_base = OTHER; note = N1-methylpseudouracil
  modified_base 585: mod_base = OTHER; note = N1-methylpseudouracil
  modified_base 592: mod_base = OTHER; note = N1-methylpseudouracil
  modified_base 597: mod_base = OTHER; note = N1-methylpseudouracil
  modified_base 603: mod_base = OTHER; note = N1-methylpseudouracil
  modified_base 606: mod_base = OTHER; note = N1-methylpseudouracil
  modified_base 615: mod_base = OTHER; note = N1-methylpseudouracil
  modified_base 621: mod_base = OTHER; note = N1-methylpseudouracil
  modified_base 625: mod_base = OTHER; note = N1-methylpseudouracil
  modified_base 626: mod_base = OTHER; note = N1-methylpseudouracil
  modified_base 641: mod_base = OTHER; note = N1-methylpseudouracil
  modified_base 653: mod_base = OTHER; note = N1-methylpseudouracil
  modified_base 654: mod_base = OTHER; note = N1-methylpseudouracil
  modified_base 675: mod_base = OTHER; note = N1-methylpseudouracil
  modified_base 678: mod_base = OTHER; note = N1-methylpseudouracil
  modified_base 681: mod_base = OTHER; note = N1-methylpseudouracil
  modified_base 705: mod_base = OTHER; note = N1-methylpseudouracil
  modified_base 707: mod_base = OTHER; note = N1-methylpseudouracil
  modified_base 708: mod_base = OTHER; note = N1-methylpseudouracil
  modified_base 714: mod_base = OTHER; note = N1-methylpseudouracil
  modified_base 717: mod_base = OTHER; note = N1-methylpseudouracil
  modified_base 725: mod_base = OTHER; note = N1-methylpseudouracil
  modified_base 729: mod_base = OTHER; note = N1-methylpseudouracil
  modified_base 742: mod_base = OTHER; note = N1-methylpseudouracil
  modified_base 747: mod_base = OTHER; note = N1-methylpseudouracil
  modified_base 754: mod_base = OTHER; note = N1-methylpseudouracil
  modified_base 761: mod_base = OTHER; note = N1-methylpseudouracil
  modified_base 762: mod_base = OTHER; note = N1-methylpseudouracil
  modified_base 767: mod_base = OTHER; note = N1-methylpseudouracil
  modified_base 768: mod_base = OTHER; note = N1-methylpseudouracil
  modified_base 770: mod_base = OTHER; note = N1-methylpseudouracil
  modified_base 780: mod_base = OTHER; note = N1-methylpseudouracil
  modified_base 781: mod_base = OTHER; note = N1-methylpseudouracil
  modified_base 792: mod_base = OTHER; note = N1-methylpseudouracil
  modified_base 804: mod_base = OTHER; note = N1-methylpseudouracil
  modified_base 815: mod_base = OTHER; note = N1-methylpseudouracil
  modified_base 816: mod_base = OTHER; note = N1-methylpseudouracil
  modified_base 819: mod_base = OTHER; note = N1-methylpseudouracil
  modified_base 825: mod_base = OTHER; note = N1-methylpseudouracil
  modified_base 842: mod_base = OTHER; note = N1-methylpseudouracil
  modified_base 864: mod_base = OTHER; note = N1-methylpseudouracil
  modified_base 872: mod_base = OTHER; note = N1-methylpseudouracil
  modified_base 873: mod_base = OTHER; note = N1-methylpseudouracil
  modified_base 891: mod_base = OTHER; note = N1-methylpseudouracil
  modified_base 894: mod_base = OTHER; note = N1-methylpseudouracil
  modified_base 897: mod_base = OTHER; note = N1-methylpseudouracil
  modified_base 903: mod_base = OTHER; note = N1-methylpseudouracil
  modified_base 905: mod_base = OTHER; note = N1-methylpseudouracil
  modified_base 906: mod_base = OTHER; note = N1-methylpseudouracil
  modified_base 930: mod_base = OTHER; note = N1-methylpseudouracil
  modified_base 933: mod_base = OTHER; note = N1-methylpseudouracil
  modified_base 935: mod_base = OTHER; note = N1-methylpseudouracil
  modified_base 954: mod_base = OTHER; note = N1-methylpseudouracil
  modified_base 959: mod_base = OTHER; note = N1-methylpseudouracil
  modified_base 964: mod_base = OTHER; note = N1-methylpseudouracil
  modified_base 967: mod_base = OTHER; note = N1-methylpseudouracil
  modified_base 968: mod_base = OTHER; note = N1-methylpseudouracil
  modified_base 969: mod_base = OTHER; note = N1-methylpseudouracil
  modified_base 981: mod_base = OTHER; note = N1-methylpseudouracil
  modified_base 984: mod_base = OTHER; note = N1-methylpseudouracil
  modified_base 987: mod_base = OTHER; note = N1-methylpseudouracil
  modified_base 989: mod_base = OTHER; note = N1-methylpseudouracil
  modified_base 992: mod_base = OTHER; note = N1-methylpseudouracil
  modified_base 993: mod_base = OTHER; note = N1-methylpseudouracil
  modified_base 995: mod_base = OTHER; note = N1-methylpseudouracil
  modified_base 1009: mod_base = OTHER; note = N1-methylpseudouracil
  modified_base 1013: mod_base = OTHER; note = N1-methylpseudouracil
  modified_base 1014: mod_base = OTHER; note = N1-methylpseudouracil
  modified_base 1020: mod_base = OTHER; note = N1-methylpseudouracil
  modified_base 1024: mod_base = OTHER; note = N1-methylpseudouracil
  modified_base 1025: mod_base = OTHER; note = N1-methylpseudouracil
  modified_base 1026: mod_base = OTHER; note = N1-methylpseudouracil
  modified_base 1032: mod_base = OTHER; note = N1-methylpseudouracil
  modified_base 1035: mod_base = OTHER; note = N1-methylpseudouracil
  modified_base 1044: mod_base = OTHER; note = N1-methylpseudouracil
  modified_base 1047: mod_base = OTHER; note = N1-methylpseudouracil
  modified_base 1053: mod_base = OTHER; note = N1-methylpseudouracil
  modified_base 1058: mod_base = OTHER; note = N1-methylpseudouracil
  modified_base 1060: mod_base = OTHER; note = N1-methylpseudouracil
  modified_base 1061: mod_base = OTHER; note = N1-methylpseudouracil
  modified_base 1062: mod_base = OTHER; note = N1-methylpseudouracil
  modified_base 1065: mod_base = OTHER; note = N1-methylpseudouracil
  modified_base 1073: mod_base = OTHER; note = N1-methylpseudouracil
  modified_base 1079: mod_base = OTHER; note = N1-methylpseudouracil
  modified_base 1089: mod_base = OTHER; note = N1-methylpseudouracil
  modified_base 1091: mod_base = OTHER; note = N1-methylpseudouracil
  modified_base 1095: mod_base = OTHER; note = N1-methylpseudouracil
  modified_base 1098: mod_base = OTHER; note = N1-methylpseudouracil
  modified_base 1107: mod_base = OTHER; note = N1-methylpseudouracil
  modified_base 1110: mod_base = OTHER; note = N1-methylpseudouracil
  modified_base 1115: mod_base = OTHER; note = N1-methylpseudouracil
  modified_base 1132: mod_base = OTHER; note = N1-methylpseudouracil
  modified_base 1135: mod_base = OTHER; note = N1-methylpseudouracil
  modified_base 1139: mod_base = OTHER; note = N1-methylpseudouracil
  modified_base 1145: mod_base = OTHER; note = N1-methylpseudouracil
  modified_base 1151: mod_base = OTHER; note = N1-methylpseudouracil
  modified_base 1155: mod_base = OTHER; note = N1-methylpseudouracil
  modified_base 1167: mod_base = OTHER; note = N1-methylpseudouracil
  modified_base 1178: mod_base = OTHER; note = N1-methylpseudouracil
  modified_base 1185: mod_base = OTHER; note = N1-methylpseudouracil
  modified_base 1187: mod_base = OTHER; note = N1-methylpseudouracil
  modified_base 1188: mod_base = OTHER; note = N1-methylpseudouracil
  modified_base 1191: mod_base = OTHER; note = N1-methylpseudouracil
  modified_base 1197: mod_base = OTHER; note = N1-methylpseudouracil
  modified_base 1199: mod_base = OTHER; note = N1-methylpseudouracil
  modified_base 1200: mod_base = OTHER; note = N1-methylpseudouracil
  modified_base 1206: mod_base = OTHER; note = N1-methylpseudouracil
  modified_base 1214: mod_base = OTHER; note = N1-methylpseudouracil
  modified_base 1218: mod_base = OTHER; note = N1-methylpseudouracil
  modified_base 1221: mod_base = OTHER; note = N1-methylpseudouracil
  modified_base 1225: mod_base = OTHER; note = N1-methylpseudouracil
  modified_base 1232: mod_base = OTHER; note = N1-methylpseudouracil
  modified_base 1236: mod_base = OTHER; note = N1-methylpseudouracil
  modified_base 1240: mod_base = OTHER; note = N1-methylpseudouracil
  modified_base 1245: mod_base = OTHER; note = N1-methylpseudouracil
  modified_base 1252: mod_base = OTHER; note = N1-methylpseudouracil
  modified_base 1257: mod_base = OTHER; note = N1-methylpseudouracil
  modified_base 1265: mod_base = OTHER; note = N1-methylpseudouracil
  modified_base 1266: mod_base = OTHER; note = N1-methylpseudouracil
  modified_base 1269: mod_base = OTHER; note = N1-methylpseudouracil
  modified_base 1271: mod_base = OTHER; note = N1-methylpseudouracil
  modified_base 1283: mod_base = OTHER; note = N1-methylpseudouracil
  modified_base 1286: mod_base = OTHER; note = N1-methylpseudouracil
  modified_base 1298: mod_base = OTHER; note = N1-methylpseudouracil
  modified_base 1301: mod_base = OTHER; note = N1-methylpseudouracil
  modified_base 1302: mod_base = OTHER; note = N1-methylpseudouracil
  modified_base 1333: mod_base = OTHER; note = N1-methylpseudouracil
  modified_base 1335: mod_base = OTHER; note = N1-methylpseudouracil
  modified_base 1339: mod_base = OTHER; note = N1-methylpseudouracil
  modified_base 1345: mod_base = OTHER; note = N1-methylpseudouracil
  modified_base 1347: mod_base = OTHER; note = N1-methylpseudouracil
  modified_base 1350: mod_base = OTHER; note = N1-methylpseudouracil
  modified_base 1356: mod_base = OTHER; note = N1-methylpseudouracil
  modified_base 1367: mod_base = OTHER; note = N1-methylpseudouracil
  modified_base 1370: mod_base = OTHER; note = N1-methylpseudouracil
  modified_base 1373: mod_base = OTHER; note = N1-methylpseudouracil
  modified_base 1378: mod_base = OTHER; note = N1-methylpseudouracil
  modified_base 1385: mod_base = OTHER; note = N1-methylpseudouracil
  modified_base 1389: mod_base = OTHER; note = N1-methylpseudouracil
  modified_base 1395: mod_base = OTHER; note = N1-methylpseudouracil
  modified_base 1398: mod_base = OTHER; note = N1-methylpseudouracil
  modified_base 1399: mod_base = OTHER; note = N1-methylpseudouracil
  modified_base 1401: mod_base = OTHER; note = N1-methylpseudouracil
  modified_base 1402: mod_base = OTHER; note = N1-methylpseudouracil
  modified_base 1408: mod_base = OTHER; note = N1-methylpseudouracil
  modified_base 1409: mod_base = OTHER; note = N1-methylpseudouracil
  modified_base 1415: mod_base = OTHER; note = N1-methylpseudouracil
  modified_base 1428: mod_base = OTHER; note = N1-methylpseudouracil
  modified_base 1431: mod_base = OTHER; note = N1-methylpseudouracil
  modified_base 1436: mod_base = OTHER; note = N1-methylpseudouracil
  modified_base 1437: mod_base = OTHER; note = N1-methylpseudouracil
  modified_base 1440: mod_base = OTHER; note = N1-methylpseudouracil
  modified_base 1448: mod_base = OTHER; note = N1-methylpseudouracil
  modified_base 1456: mod_base = OTHER; note = N1-methylpseudouracil
  modified_base 1459: mod_base = OTHER; note = N1-methylpseudouracil
  modified_base 1461: mod_base = OTHER; note = N1-methylpseudouracil
  modified_base 1462: mod_base = OTHER; note = N1-methylpseudouracil
  modified_base 1463: mod_base = OTHER; note = N1-methylpseudouracil
  modified_base 1467: mod_base = OTHER; note = N1-methylpseudouracil
  modified_base 1472: mod_base = OTHER; note = N1-methylpseudouracil
  modified_base 1474: mod_base = OTHER; note = N1-methylpseudouracil
  modified_base 1478: mod_base = OTHER; note = N1-methylpseudouracil

SEQ ID NO: 329 - RNA, 1514 nt, synthetic construct; identical to SEQ ID NO: 324
  source 1..1514: mol_type = other RNA
  modified_base 6: mod_base = OTHER; note = N1-methylpseudouracil
  modified_base 14: mod_base = OTHER; note = N1-methylpseudouracil
  modified_base 15: mod_base = OTHER; note = N1-methylpseudouracil
  modified_base 16: mod_base = OTHER; note = N1-methylpseudouracil
  modified_base 19: mod_base = OTHER; note = N1-methylpseudouracil
  modified_base 21: mod_base = OTHER; note = N1-methylpseudouracil
  modified_base 22: mod_base = OTHER; note = N1-methylpseudouracil
  modified_base 27: mod_base = OTHER; note = N1-methylpseudouracil
  modified_base 28: mod_base = OTHER; note = N1-methylpseudouracil
  modified_base 32: mod_base = OTHER; note = N1-methylpseudouracil
  modified_base 33: mod_base = OTHER; note = N1-methylpseudouracil
  modified_base 34: mod_base = OTHER; note = N1-methylpseudouracil
  modified_base 36: mod_base = OTHER; note = N1-methylpseudouracil
  modified_base 37: mod_base = OTHER; note = N1-methylpseudouracil
  modified_base 38: mod_base = OTHER; note = N1-methylpseudouracil
  modified_base 39: mod_base = OTHER; note = N1-methylpseudouracil
  modified_base 42: mod_base = OTHER; note = N1-methylpseudouracil
  modified_base 43: mod_base = OTHER; note = N1-methylpseudouracil
  modified_base 44: mod_base = OTHER; note = N1-methylpseudouracil
  modified_base 45: mod_base = OTHER; note = N1-methylpseudouracil
  modified_base 47: mod_base = OTHER; note = N1-methylpseudouracil
  modified_base 54: mod_base = OTHER; note = N1-methylpseudouracil
  modified_base 62: mod_base = OTHER; note = N1-methylpseudouracil
  modified_base 63: mod_base = OTHER; note = N1-methylpseudouracil
  modified_base 64: mod_base = OTHER; note = N1-methylpseudouracil
  modified_base 65: mod_base = OTHER; note = N1-methylpseudouracil
  modified_base 66: mod_base = OTHER; note = N1-methylpseudouracil
  modified_base 68: mod_base = OTHER; note = N1-methylpseudouracil
  modified_base 69: mod_base = OTHER; note = N1-methylpseudouracil
  modified_base 71: mod_base = OTHER; note = N1-methylpseudouracil
  modified_base 77: mod_base = OTHER; note = N1-methylpseudouracil
  modified_base 91: mod_base = OTHER; note = N1-methylpseudouracil
  modified_base 108: mod_base = OTHER; note = N1-methylpseudouracil
  modified_base 109: mod_base = OTHER; note = N1-methylpseudouracil
  modified_base 126: mod_base = OTHER; note = N1-methylpseudouracil
  modified_base 133: mod_base = OTHER; note = N1-methylpseudouracil
  modified_base 135: mod_base = OTHER; note = N1-methylpseudouracil
  modified_base 142: mod_base = OTHER; note = N1-methylpseudouracil
  modified_base 148: mod_base = OTHER; note = N1-methylpseudouracil
  modified_base 149: mod_base = OTHER; note = N1-methylpseudouracil
  modified_base 152: mod_base = OTHER; note = N1-methylpseudouracil
  modified_base 163: mod_base = OTHER; note = N1-methylpseudouracil
  modified_base 164: mod_base = OTHER; note = N1-methylpseudouracil
  modified_base 169: mod_base = OTHER; note = N1-methylpseudouracil
  modified_base 175: mod_base = OTHER; note = N1-methylpseudouracil
  modified_base 176: mod_base = OTHER; note = N1-methylpseudouracil
  modified_base 185: mod_base = OTHER; note = N1-methylpseudouracil
  modified_base 191: mod_base = OTHER; note = N1-methylpseudouracil
  modified_base 214: mod_base = OTHER; note = N1-methylpseudouracil
  modified_base 227: mod_base = OTHER; note = N1-methylpseudouracil
  modified_base 246: mod_base = OTHER; note = N1-methylpseudouracil
  modified_base 251: mod_base = OTHER; note = N1-methylpseudouracil
  modified_base 254: mod_base = OTHER; note = N1-methylpseudouracil
  modified_base 256: mod_base = OTHER; note = N1-methylpseudouracil
  modified_base 265: mod_base = OTHER; note = N1-methylpseudouracil
  modified_base 269: mod_base = OTHER; note = N1-methylpseudouracil
  modified_base 275: mod_base = OTHER; note = N1-methylpseudouracil
  modified_base 284: mod_base = OTHER; note = N1-methylpseudouracil
  modified_base 287: mod_base = OTHER; note = N1-methylpseudouracil
  modified_base 302: mod_base = OTHER; note = N1-methylpseudouracil
  modified_base 307: mod_base = OTHER; note = N1-methylpseudouracil
  modified_base 324: mod_base = OTHER; note = N1-methylpseudouracil
  modified_base 329: mod_base = OTHER; note = N1-methylpseudouracil
  modified_base 344: mod_base = OTHER; note = N1-methylpseudouracil
  modified_base 346: mod_base = OTHER; note = N1-methylpseudouracil
  modified_base 347: mod_base = OTHER; note = N1-methylpseudouracil
  modified_base 350: mod_base = OTHER; note = N1-methylpseudouracil
  modified_base 353: mod_base = OTHER; note = N1-methylpseudouracil
  modified_base 367: mod_base = OTHER; note = N1-methylpseudouracil
  modified_base 374: mod_base = OTHER; note = N1-methylpseudouracil
  modified_base 376: mod_base = OTHER; note = N1-methylpseudouracil
  modified_base 379: mod_base = OTHER; note = N1-methylpseudouracil
  modified_base 380: mod_base = OTHER; note = N1-methylpseudouracil
  modified_base 389: mod_base = OTHER; note = N1-methylpseudouracil
  modified_base 392: mod_base = OTHER; note = N1-methylpseudouracil
  modified_base 394: mod_base = OTHER; note = N1-methylpseudouracil
  modified_base 401: mod_base = OTHER; note = N1-methylpseudouracil
  modified_base 405: mod_base = OTHER; note = N1-methylpseudouracil
  modified_base 410: mod_base = OTHER; note = N1-methylpseudouracil
  modified_base 419: mod_base = OTHER; note = N1-methylpseudouracil
  modified_base 421: mod_base = OTHER; note = N1-methylpseudouracil
  modified_base 422: mod_base = OTHER; note = N1-methylpseudouracil
  modified_base 437: mod_base = OTHER; note = N1-methylpseudouracil
  modified_base 455: mod_base = OTHER; note = N1-methylpseudouracil
  modified_base 458: mod_base = OTHER; note = N1-methylpseudouracil
  modified_base 464: mod_base = OTHER; note = N1-methylpseudouracil
  modified_base 467: mod_base = OTHER; note = N1-methylpseudouracil
  modified_base 476: mod_base = OTHER; note = N1-methylpseudouracil
  modified_base 485: mod_base = OTHER; note = N1-methylpseudouracil
  modified_base 487: mod_base = OTHER; note = N1-methylpseudouracil
  modified_base 491: mod_base = OTHER; note = N1-methylpseudouracil
  modified_base 494: mod_base = OTHER; note = N1-methylpseudouracil
  modified_base 497: mod_base = OTHER; note = N1-methylpseudouracil
  modified_base 503: mod_base = OTHER; note = N1-methylpseudouracil
  modified_base 506: mod_base = OTHER; note = N1-methylpseudouracil
  modified_base 509: mod_base = OTHER; note = N1-methylpseudouracil
  modified_base 517: mod_base = OTHER; note = N1-methylpseudouracil
  modified_base 518: mod_base = OTHER; note = N1-methylpseudouracil
  modified_base 522: mod_base = OTHER; note = N1-methylpseudouracil
  modified_base 524: mod_base = OTHER; note = N1-methylpseudouracil
  modified_base 527: mod_base = OTHER; note = N1-methylpseudouracil
  modified_base 536: mod_base = OTHER; note = N1-methylpseudouracil
  modified_base 545: mod_base = OTHER; note = N1-methylpseudouracil
  modified_base 550: mod_base = OTHER; note = N1-methylpseudouracil
  modified_base 551: mod_base = OTHER; note = N1-methylpseudouracil
  modified_base 559: mod_base = OTHER; note = N1-methylpseudouracil
  modified_base 560: mod_base = OTHER; note = N1-methylpseudouracil
  modified_base 568: mod_base = OTHER; note = N1-methylpseudouracil
  modified_base 572: mod_base = OTHER; note = N1-methylpseudouracil
  modified_base 583: mod_base = OTHER; note = N1-methylpseudouracil
  modified_base 589: mod_base = OTHER; note = N1-methylpseudouracil
  modified_base 590: mod_base = OTHER; note = N1-methylpseudouracil
  modified_base 595: mod_base = OTHER; note = N1-methylpseudouracil
  modified_base 599: mod_base = OTHER; note = N1-methylpseudouracil
  modified_base 604: mod_base = OTHER; note = N1-methylpseudouracil
  modified_base 605: mod_base = OTHER; note = N1-methylpseudouracil
  modified_base 611: mod_base = OTHER; note = N1-methylpseudouracil
  modified_base 614: mod_base = OTHER; note = N1-methylpseudouracil
  modified_base 626: mod_base = OTHER; note = N1-methylpseudouracil
  modified_base 632: mod_base = OTHER; note = N1-methylpseudouracil
  modified_base 635: mod_base = OTHER; note = N1-methylpseudouracil
  modified_base 644: mod_base = OTHER; note = N1-methylpseudouracil
  modified_base 650: mod_base = OTHER; note = N1-methylpseudouracil
  modified_base 654: mod_base = OTHER; note = N1-methylpseudouracil
  modified_base 655: mod_base = OTHER; note = N1-methylpseudouracil
  modified_base 670: mod_base = OTHER; note = N1-methylpseudouracil
  modified_base 682: mod_base = OTHER; note = N1-methylpseudouracil
  modified_base 683: mod_base = OTHER; note = N1-methylpseudouracil
  modified_base 704: mod_base = OTHER; note = N1-methylpseudouracil
  modified_base 707: mod_base = OTHER; note = N1-methylpseudouracil
  modified_base 710: mod_base = OTHER; note = N1-methylpseudouracil
  modified_base 715: mod_base = OTHER; note = N1-methylpseudouracil
  modified_base 734: mod_base = OTHER; note = N1-methylpseudouracil
  modified_base 737: mod_base = OTHER; note = N1-methylpseudouracil
  modified_base 743: mod_base = OTHER; note = N1-methylpseudouracil
  modified_base 746: mod_base = OTHER; note = N1-methylpseudouracil
  modified_base 754: mod_base = OTHER; note = N1-methylpseudouracil
  modified_base 758: mod_base = OTHER; note = N1-methylpseudouracil
  modified_base 776: mod_base = OTHER; note = N1-methylpseudouracil
  modified_base 790: mod_base = OTHER; note = N1-methylpseudouracil
  modified_base 791: mod_base = OTHER; note = N1-methylpseudouracil
  modified_base 796: mod_base = OTHER; note = N1-methylpseudouracil
  modified_base 797: mod_base = OTHER; note = N1-methylpseudouracil
  modified_base 799: mod_base = OTHER; note = N1-methylpseudouracil
  modified_base 809: mod_base = OTHER; note = N1-methylpseudouracil
  modified_base 821: mod_base = OTHER; note = N1-methylpseudouracil
  modified_base 833: mod_base = OTHER; note = N1-methylpseudouracil
  modified_base 844: mod_base = OTHER; note = N1-methylpseudouracil
  modified_base 845: mod_base = OTHER; note = N1-methylpseudouracil
  modified_base 848: mod_base = OTHER; note = N1-methylpseudouracil
  modified_base 854: mod_base = OTHER; note = N1-methylpseudouracil
  modified_base 871: mod_base = OTHER; note = N1-methylpseudouracil
  modified_base 893: mod_base = OTHER; note = N1-methylpseudouracil
  modified_base 901: mod_base = OTHER; note = N1-methylpseudouracil
  modified_base 902: mod_base = OTHER; note = N1-methylpseudouracil
  modified_base 920: mod_base = OTHER; note = N1-methylpseudouracil
  modified_base 923: mod_base = OTHER; note = N1-methylpseudouracil
  modified_base 926: mod_base = OTHER; note = N1-methylpseudouracil
  modified_base 932: mod_base = OTHER; note = N1-methylpseudouracil
  modified_base 934: mod_base = OTHER; note = N1-methylpseudouracil
  modified_base 935: mod_base = OTHER; note = N1-methylpseudouracil
  modified_base 959: mod_base = OTHER; note = N1-methylpseudouracil
  modified_base 962: mod_base = OTHER; note = N1-methylpseudouracil
  modified_base 964: mod_base = OTHER; note = N1-methylpseudouracil
  modified_base 983: mod_base = OTHER; note = N1-methylpseudouracil
  modified_base 988: mod_base = OTHER; note = N1-methylpseudouracil
  modified_base 998: mod_base = OTHER; note = N1-methylpseudouracil
  modified_base 1010: mod_base = OTHER; note = N1-methylpseudouracil
  modified_base 1013: mod_base = OTHER; note = N1-methylpseudouracil
  modified_base 1016: mod_base = OTHER; note = N1-methylpseudouracil
  modified_base 1018: mod_base = OTHER; note = N1-methylpseudouracil
  modified_base 1021: mod_base = OTHER; note = N1-methylpseudouracil
  modified_base 1022: mod_base = OTHER; note = N1-methylpseudouracil
  modified_base 1024: mod_base = OTHER; note = N1-methylpseudouracil
  modified_base 1042: mod_base = OTHER; note = N1-methylpseudouracil
  modified_base 1043: mod_base = OTHER; note = N1-methylpseudouracil
  modified_base 1049: mod_base = OTHER; note = N1-methylpseudouracil
  modified_base 1054: mod_base = OTHER; note = N1-methylpseudouracil
  modified_base 1055: mod_base = OTHER; note = N1-methylpseudouracil
  modified_base 1061: mod_base = OTHER; note = N1-methylpseudouracil
  modified_base 1064: mod_base = OTHER; note = N1-methylpseudouracil
  modified_base 1073: mod_base = OTHER; note = N1-methylpseudouracil
  modified_base 1076: mod_base = OTHER; note = N1-methylpseudouracil
  modified_base 1082: mod_base = OTHER; note = N1-methylpseudouracil
  modified_base 1091: mod_base = OTHER; note = N1-methylpseudouracil
  modified_base 1094: mod_base = OTHER; note = N1-methylpseudouracil
  modified_base 1102: mod_base = OTHER; note = N1-methylpseudouracil
  modified_base 1108: mod_base = OTHER; note = N1-methylpseudouracil
  modified_base 1118: mod_base = OTHER; note = N1-methylpseudouracil
  modified_base 1120: mod_base = OTHER; note = N1-methylpseudouracil
  modified_base 1124: mod_base = OTHER; note = N1-methylpseudouracil
  modified_base 1127: mod_base = OTHER; note = N1-methylpseudouracil
  modified_base 1136: mod_base = OTHER; note = N1-methylpseudouracil
  modified_base 1139: mod_base = OTHER; note = N1-methylpseudouracil
  modified_base 1144: mod_base = OTHER; note = N1-methylpseudouracil
  modified_base 1167: mod_base = OTHER; note = N1-methylpseudouracil
  modified_base 1168: mod_base = OTHER; note = N1-methylpseudouracil
  modified_base 1174: mod_base = OTHER; note = N1-methylpseudouracil
  modified_base 1180: mod_base = OTHER; note = N1-methylpseudouracil
  modified_base 1184: mod_base = OTHER; note = N1-methylpseudouracil
  modified_base 1196: mod_base = OTHER; note = N1-methylpseudouracil
  modified_base 1198: mod_base = OTHER; note = N1-methylpseudouracil
  modified_base 1207: mod_base = OTHER; note = N1-methylpseudouracil
  modified_base 1214: mod_base = OTHER; note = N1-methylpseudouracil
  modified_base 1216: mod_base = OTHER; note = N1-methylpseudouracil
  modified_base 1217: mod_base = OTHER; note = N1-methylpseudouracil
  modified_base 1220: mod_base = OTHER; note = N1-methylpseudouracil
  modified_base 1226: mod_base = OTHER; note = N1-methylpseudouracil
  modified_base 1228: mod_base = OTHER; note = N1-methylpseudouracil
  modified_base 1229: mod_base = OTHER; note = N1-methylpseudouracil
  modified_base 1235: mod_base = OTHER; note = N1-methylpseudouracil
  modified_base 1243: mod_base = OTHER; note = N1-methylpseudouracil
  modified_base 1247: mod_base = OTHER; note = N1-methylpseudouracil
  modified_base 1250: mod_base = OTHER; note = N1-methylpseudouracil
  modified_base 1254: mod_base = OTHER; note = N1-methylpseudouracil
  modified_base 1261: mod_base = OTHER; note = N1-methylpseudouracil
  modified_base 1265: mod_base = OTHER; note = N1-methylpseudouracil
  modified_base 1269: mod_base = OTHER; note = N1-methylpseudouracil
  modified_base 1274: mod_base = OTHER; note = N1-methylpseudouracil
  modified_base 1286: mod_base = OTHER; note = N1-methylpseudouracil
  modified_base 1294: mod_base = OTHER; note = N1-methylpseudouracil
  modified_base 1295: mod_base = OTHER; note = N1-methylpseudouracil
  modified_base 1298: mod_base = OTHER; note = N1-methylpseudouracil
  modified_base 1300: mod_base = OTHER; note = N1-methylpseudouracil
  modified_base 1312: mod_base = OTHER; note = N1-methylpseudouracil
  modified_base 1315: mod_base = OTHER; note = N1-methylpseudouracil
  modified_base 1327: mod_base = OTHER; note = N1-methylpseudouracil
  modified_base 1330: mod_base = OTHER; note = N1-methylpseudouracil
  modified_base 1331: mod_base = OTHER; note = N1-methylpseudouracil
  modified_base 1333: mod_base = OTHER; note = N1-methylpseudouracil
  modified_base 1336: mod_base = OTHER; note = N1-methylpseudouracil
  modified_base 1345: mod_base = OTHER; note = N1-methylpseudouracil
  modified_base 1364: mod_base = OTHER; note = N1-methylpseudouracil
  modified_base 1371: mod_base = OTHER; note = N1-methylpseudouracil
  modified_base 1376: mod_base = OTHER; note = N1-methylpseudouracil
  modified_base 1379: mod_base = OTHER; note = N1-methylpseudouracil
  modified_base 1385: mod_base = OTHER; note = N1-methylpseudouracil
  modified_base 1390: mod_base = OTHER; note = N1-methylpseudouracil
  modified_base 1396: mod_base = OTHER; note = N1-methylpseudouracil
  modified_base 1400: mod_base = OTHER; note = N1-methylpseudouracil
  modified_base 1402: mod_base = OTHER; note = N1-methylpseudouracil
  modified_base 1407: mod_base = OTHER; note = N1-methylpseudouracil
  modified_base 1414: mod_base = OTHER; note = N1-methylpseudouracil
  modified_base 1418: mod_base = OTHER; note = N1-methylpseudouracil
  modified_base 1423: mod_base = OTHER; note = N1-methylpseudouracil
  modified_base 1427: mod_base = OTHER; note = N1-methylpseudouracil
  modified_base 1428: mod_base = OTHER; note = N1-methylpseudouracil
  modified_base 1430: mod_base = OTHER; note = N1-methylpseudouracil
  modified_base 1431: mod_base = OTHER; note = N1-methylpseudouracil
  modified_base 1437: mod_base = OTHER; note = N1-methylpseudouracil
  modified_base 1438: mod_base = OTHER; note = N1-methylpseudouracil
  modified_base 1444: mod_base = OTHER; note = N1-methylpseudouracil
  modified_base 1457: mod_base = OTHER; note = N1-methylpseudouracil
  modified_base 1460: mod_base = OTHER; note = N1-methylpseudouracil
  modified_base 1465: mod_base = OTHER; note = N1-methylpseudouracil
  modified_base 1466: mod_base = OTHER; note = N1-methylpseudouracil
  modified_base 1469: mod_base = OTHER; note = N1-methylpseudouracil
  modified_base 1477: mod_base = OTHER; note = N1-methylpseudouracil
  modified_base 1485: mod_base = OTHER; note = N1-methylpseudouracil
  modified_base 1488: mod_base = OTHER; note = N1-methylpseudouracil
  modified_base 1490: mod_base = OTHER; note = N1-methylpseudouracil
  modified_base 1491: mod_base = OTHER; note = N1-methylpseudouracil
  modified_base 1492: mod_base = OTHER; note = N1-methylpseudouracil
  modified_base 1496: mod_base = OTHER; note = N1-methylpseudouracil
  modified_base 1501: mod_base = OTHER; note = N1-methylpseudouracil
  modified_base 1503: mod_base = OTHER; note = N1-methylpseudouracil
  modified_base 1507: mod_base = OTHER; note = N1-methylpseudouracil

SEQ ID NO: 330 - RNA, 1489 nt, synthetic construct
  source 1..1489: mol_type = other RNA
  modified_base 6: mod_base = OTHER; note = N1-methylpseudouracil
  modified_base 24: mod_base = OTHER; note = N1-methylpseudouracil
  modified_base 34: mod_base = OTHER; note = N1-methylpseudouracil
  modified_base 36: mod_base = OTHER; note = N1-methylpseudouracil
  modified_base 58: mod_base = OTHER; note = N1-methylpseudouracil
  modified_base 66: mod_base = OTHER; note = N1-methylpseudouracil
  modified_base 72: mod_base = OTHER; note = N1-methylpseudouracil
  modified_base 73: mod_base = OTHER; note = N1-methylpseudouracil
  modified_base 76: mod_base = OTHER; note = N1-methylpseudouracil
  modified_base 87: mod_base = OTHER; note = N1-methylpseudouracil
  modified_base 88: mod_base = OTHER; note = N1-methylpseudouracil
  modified_base 93: mod_base = OTHER; note = N1-methylpseudouracil
  modified_base 99: mod_base = OTHER; note = N1-methylpseudouracil
  modified_base 100: mod_base = OTHER; note = N1-methylpseudouracil
  modified_base 109: mod_base = OTHER; note = N1-methylpseudouracil
  modified_base 115: mod_base = OTHER; note = N1-methylpseudouracil
  modified_base 151: mod_base = OTHER; note = N1-methylpseudouracil
  modified_base 175: mod_base = OTHER; note = N1-methylpseudouracil
  modified_base 178: mod_base = OTHER; note = N1-methylpseudouracil
  modified_base 180: mod_base = OTHER; note = N1-methylpseudouracil
  modified_base 189: mod_base = OTHER; note = N1-methylpseudouracil
  modified_base 193: mod_base = OTHER; note = N1-methylpseudouracil
  modified_base 199: mod_base = OTHER; note = N1-methylpseudouracil
  modified_base 208: mod_base = OTHER; note = N1-methylpseudouracil
  modified_base 211: mod_base = OTHER; note = N1-methylpseudouracil
  modified_base 226: mod_base = OTHER; note = N1-methylpseudouracil
  modified_base 253: mod_base = OTHER; note = N1-methylpseudouracil
  modified_base 268: mod_base = OTHER; note = N1-methylpseudouracil
  modified_base 270: mod_base = OTHER; note = N1-methylpseudouracil
  modified_base 271: mod_base = OTHER; note = N1-methylpseudouracil
  modified_base 274: mod_base = OTHER; note = N1-methylpseudouracil
  modified_base 277: mod_base = OTHER; note = N1-methylpseudouracil
  modified_base 291: mod_base = OTHER; note = N1-methylpseudouracil
  modified_base 298: mod_base = OTHER; note = N1-methylpseudouracil
  modified_base 300: mod_base = OTHER; note = N1-methylpseudouracil
  modified_base 303: mod_base = OTHER; note = N1-methylpseudouracil
  modified_base 304: mod_base = OTHER; note = N1-methylpseudouracil
  modified_base 313: mod_base = OTHER; note = N1-methylpseudouracil
  modified_base 316: mod_base = OTHER; note = N1-methylpseudouracil
  modified_base 318: mod_base = OTHER; note = N1-methylpseudouracil
  modified_base 325: mod_base = OTHER; note = N1-methylpseudouracil
  modified_base 334: mod_base = OTHER; note = N1-methylpseudouracil
  modified_base 343: mod_base = OTHER; note = N1-methylpseudouracil
  modified_base 345: mod_base = OTHER; note = N1-methylpseudouracil
  modified_base 346: mod_base = OTHER; note = N1-methylpseudouracil
  modified_base 361: mod_base = OTHER; note = N1-methylpseudouracil
  modified_base 379: mod_base = OTHER; note = N1-methylpseudouracil
  modified_base 382: mod_base = OTHER; note = N1-methylpseudouracil
  modified_base 388: mod_base = OTHER; note = N1-methylpseudouracil
  modified_base 391: mod_base = OTHER; note = N1-methylpseudouracil
  modified_base 400: mod_base = OTHER; note = N1-methylpseudouracil
  modified_base 409: mod_base = OTHER; note = N1-methylpseudouracil
  modified_base 415: mod_base = OTHER; note = N1-methylpseudouracil
  modified_base 418: mod_base = OTHER; note = N1-methylpseudouracil
  modified_base 421: mod_base = OTHER; note = N1-methylpseudouracil
  modified_base 427: mod_base = OTHER; note = N1-methylpseudouracil
  modified_base 430: mod_base = OTHER; note = N1-methylpseudouracil
  modified_base 433: mod_base = OTHER; note = N1-methylpseudouracil
  modified_base 441: mod_base = OTHER; note = N1-methylpseudouracil
  modified_base 442: mod_base = OTHER; note = N1-methylpseudouracil
  modified_base 448: mod_base = OTHER; note = N1-methylpseudouracil
  modified_base 451: mod_base = OTHER; note = N1-methylpseudouracil
  modified_base 460: mod_base = OTHER; note = N1-methylpseudouracil
  modified_base 469: mod_base = OTHER; note = N1-methylpseudouracil
  modified_base 474: mod_base = OTHER; note = N1-methylpseudouracil
  modified_base 475: mod_base = OTHER; note = N1-methylpseudouracil
  modified_base 483: mod_base = OTHER; note = N1-methylpseudouracil
  modified_base 484: mod_base = OTHER; note = N1-methylpseudouracil
  modified_base 492: mod_base = OTHER; note = N1-methylpseudouracil
  modified_base 495: mod_base = OTHER; note = N1-methylpseudouracil
  modified_base 496: mod_base = OTHER; note = N1-methylpseudouracil
  modified_base 507: mod_base = OTHER; note = N1-methylpseudouracil
  modified_base 513: mod_base = OTHER; note = N1-methylpseudouracil
  modified_base 514: mod_base = OTHER; note = N1-methylpseudouracil
  modified_base 515: mod_base = OTHER; note = N1-methylpseudouracil
  modified_base 523: mod_base = OTHER; note = N1-methylpseudouracil
  modified_base 528: mod_base = OTHER; note = N1-methylpseudouracil
  modified_base 529: mod_base = OTHER; note = N1-methylpseudouracil
  modified_base 535: mod_base = OTHER; note = N1-methylpseudouracil
  modified_base 538: mod_base = OTHER; note = N1-methylpseudouracil
  modified_base 550: mod_base = OTHER; note = N1-methylpseudouracil
  modified_base 556: mod_base = OTHER; note = N1-methylpseudouracil
  modified_base 559: mod_base = OTHER; note = N1-methylpseudouracil
  modified_base 568: mod_base = OTHER; note = N1-methylpseudouracil
  modified_base 574: mod_base = OTHER; note = N1-methylpseudouracil
  modified_base 579: mod_base = OTHER; note = N1-methylpseudouracil
  modified_base 594: mod_base = OTHER; note = N1-methylpseudouracil
  modified_base 606: mod_base = OTHER; note = N1-methylpseudouracil
  modified_base 607: mod_base = OTHER; note = N1-methylpseudouracil
  modified_base 628: mod_base = OTHER; note = N1-methylpseudouracil
  modified_base 631: mod_base = OTHER; note = N1-methylpseudouracil
  modified_base 634: mod_base = OTHER; note = N1-methylpseudouracil
  modified_base 658: mod_base = OTHER; note = N1-methylpseudouracil
  modified_base 661: mod_base = OTHER; note = N1-methylpseudouracil
  modified_base 667: mod_base = OTHER; note = N1-methylpseudouracil
  modified_base 670: mod_base = OTHER; note = N1-methylpseudouracil
  modified_base 678: mod_base = OTHER; note = N1-methylpseudouracil
  modified_base 682: mod_base = OTHER; note = N1-methylpseudouracil
  modified_base 700: mod_base = OTHER; note = N1-methylpseudouracil
  modified_base 714: mod_base = OTHER; note = N1-methylpseudouracil
  modified_base 715: mod_base = OTHER; note = N1-methylpseudouracil
  modified_base 720: mod_base = OTHER; note = N1-methylpseudouracil
  modified_base 721: mod_base = OTHER; note = N1-methylpseudouracil
  modified_base 723: mod_base = OTHER; note = N1-methylpseudouracil
  modified_base 733: mod_base = OTHER; note = N1-methylpseudouracil
  modified_base 745: mod_base = OTHER; note = N1-methylpseudouracil
  modified_base 757: mod_base = OTHER; note = N1-methylpseudouracil
  modified_base 768: mod_base = OTHER; note = N1-methylpseudouracil
  modified_base 769: mod_base = OTHER; note = N1-methylpseudouracil
  modified_base 772: mod_base = OTHER; note = N1-methylpseudouracil
  modified_base 778: mod_base = OTHER; note = N1-methylpseudouracil
  modified_base 817: mod_base = OTHER; note = N1-methylpseudouracil
  modified_base 825: mod_base = OTHER; note = N1-methylpseudouracil
  modified_base 826: mod_base = OTHER; note = N1-methylpseudouracil
  modified_base 844: mod_base = OTHER; note = N1-methylpseudouracil
  modified_base 847: mod_base = OTHER; note = N1-methylpseudouracil
  modified_base 850: mod_base = OTHER; note = N1-methylpseudouracil
  modified_base 856: mod_base = OTHER; note = N1-methylpseudouracil
  modified_base 858: mod_base = OTHER; note = N1-methylpseudouracil
  modified_base 859: mod_base = OTHER; note = N1-methylpseudouracil
  modified_base 881: mod_base = OTHER; note = N1-methylpseudouracil
  modified_base 883: mod_base = OTHER; note = N1-methylpseudouracil
  modified_base 884: mod_base = OTHER; note = N1-methylpseudouracil
  modified_base 886: mod_base = OTHER; note = N1-methylpseudouracil
  modified_base 888: mod_base = OTHER; note = N1-methylpseudouracil
  modified_base 907: mod_base = OTHER; note = N1-methylpseudouracil
  modified_base 912: mod_base = OTHER; note = N1-methylpseudouracil
  modified_base 914: mod_base = OTHER; note = N1-methylpseudouracil
  modified_base 922: mod_base = OTHER; note = N1-methylpseudouracil
  modified_base 934: mod_base = OTHER; note = N1-methylpseudouracil
  modified_base 937: mod_base = OTHER; note = N1-methylpseudouracil
  modified_base 940: mod_base = OTHER; note = N1-methylpseudouracil
  modified_base 942: mod_base = OTHER; note = N1-methylpseudouracil
  modified_base 945: mod_base = OTHER; note = N1-methylpseudouracil
  modified_base 946: mod_base = OTHER; note = N1-methylpseudouracil
  modified_base 948: mod_base = OTHER; note = N1-methylpseudouracil
  modified_base 966: mod_base = OTHER; note = N1-methylpseudouracil
  modified_base 967: mod_base = OTHER; note = N1-methylpseudouracil
  modified_base 973: mod_base = OTHER; note = N1-methylpseudouracil
  modified_base 978: mod_base = OTHER; note = N1-methylpseudouracil
  modified_base 979: mod_base = OTHER; note = N1-methylpseudouracil
  modified_base 985: mod_base = OTHER; note = N1-methylpseudouracil
  modified_base 988: mod_base = OTHER; note = N1-methylpseudouracil
  modified_base 997: mod_base = OTHER; note = N1-methylpseudouracil
  modified_base 1000: mod_base = OTHER; note = N1-methylpseudouracil
  modified_base 1006: mod_base = OTHER; note = N1-methylpseudouracil
  modified_base 1010: mod_base = OTHER; note = N1-methylpseudouracil
  modified_base 1015: mod_base = OTHER; note = N1-methylpseudouracil
  modified_base 1018: mod_base = OTHER; note = N1-methylpseudouracil
  modified_base 1026: mod_base = OTHER; note = N1-methylpseudouracil
  modified_base 1032: mod_base = OTHER; note = N1-methylpseudouracil
  modified_base 1042: mod_base = OTHER; note = N1-methylpseudouracil
  modified_base 1044: mod_base = OTHER; note = N1-methylpseudouracil
  modified_base 1048: mod_base = OTHER; note = N1-methylpseudouracil
  modified_base 1051: mod_base = OTHER; note = N1-methylpseudouracil
  modified_base 1060: mod_base = OTHER; note = N1-methylpseudouracil
  modified_base 1063: mod_base = OTHER; note = N1-methylpseudouracil
  modified_base 1098: mod_base = OTHER; note = N1-methylpseudouracil
  modified_base 1104: mod_base = OTHER; note = N1-methylpseudouracil
  modified_base 1108: mod_base = OTHER; note = N1-methylpseudouracil
  modified_base 1120: mod_base = OTHER; note = N1-methylpseudouracil
  modified_base 1131: mod_base = OTHER; note = N1-methylpseudouracil
  modified_base 1138: mod_base = OTHER; note = N1-methylpseudouracil
  modified_base 1140: mod_base = OTHER; note = N1-methylpseudouracil
  modified_base 1141: mod_base = OTHER; note = N1-methylpseudouracil
  modified_base 1144: mod_base = OTHER; note = N1-methylpseudouracil
  modified_base 1150: mod_base = OTHER; note = N1-methylpseudouracil
  modified_base 1152: mod_base = OTHER; note = N1-methylpseudouracil
  modified_base 1153: mod_base = OTHER; note = N1-methylpseudouracil
  modified_base 1159: mod_base = OTHER; note = N1-methylpseudouracil
  modified_base 1167: mod_base = OTHER; note = N1-methylpseudouracil
  modified_base 1171: mod_base = OTHER; note = N1-methylpseudouracil
  modified_base 1174: mod_base = OTHER; note = N1-methylpseudouracil
  modified_base 1175: mod_base = OTHER; note = N1-methylpseudouracil
  modified_base 1185: mod_base = OTHER; note = N1-methylpseudouracil
  modified_base 1189: mod_base = OTHER; note = N1-methylpseudouracil
  modified_base 1198: mod_base = OTHER; note = N1-methylpseudouracil
  modified_base 1210: mod_base = OTHER; note = N1-methylpseudouracil
  modified_base 1218: mod_base = OTHER; note = N1-methylpseudouracil
  modified_base 1219: mod_base = OTHER; note = N1-methylpseudouracil
  modified_base 1222: mod_base = OTHER; note = N1-methylpseudouracil
  modified_base 1224: mod_base = OTHER; note = N1-methylpseudouracil
  modified_base 1236: mod_base = OTHER; note = N1-methylpseudouracil
  modified_base 1239: mod_base = OTHER; note = N1-methylpseudouracil
  modified_base 1251: mod_base = OTHER; note = N1-methylpseudouracil
  modified_base 1254: mod_base = OTHER; note = N1-methylpseudouracil
  modified_base 1255: mod_base = OTHER; note = N1-methylpseudouracil
  modified_base 1269: mod_base = OTHER; note = N1-methylpseudouracil
  modified_base 1283: mod_base = OTHER; note = N1-methylpseudouracil
  modified_base 1290: mod_base = OTHER; note = N1-methylpseudouracil
  modified_base 1308: mod_base = OTHER; note = N1-methylpseudouracil
  modified_base 1315: mod_base = OTHER; note = N1-methylpseudouracil
  modified_base 1324: mod_base = OTHER; note = N1-methylpseudouracil
  modified_base 1343: mod_base = OTHER; note = N1-methylpseudouracil
  modified_base 1350: mod_base = OTHER; note = N1-methylpseudouracil
  modified_base 1354: mod_base = OTHER; note = N1-methylpseudouracil
  modified_base 1360: mod_base = OTHER; note = N1-methylpseudouracil
  modified_base 1368: mod_base = OTHER; note = N1-methylpseudouracil
  modified_base 1371: mod_base = OTHER; note = N1-methylpseudouracil
  modified_base 1374: mod_base = OTHER; note = N1-methylpseudouracil
  modified_base 1377: mod_base = OTHER; note = N1-methylpseudouracil
  modified_base 1382: mod_base = OTHER; note = N1-methylpseudouracil
  modified_base 1389: mod_base = OTHER; note = N1-methylpseudouracil
  modified_base 1393: mod_base = OTHER; note = N1-methylpseudouracil
  modified_base 1398: mod_base = OTHER; note = N1-methylpseudouracil
  modified_base 1402: mod_base = OTHER; note = N1-methylpseudouracil
  modified_base 1403: mod_base = OTHER; note = N1-methylpseudouracil
  modified_base 1405: mod_base = OTHER; note = N1-methylpseudouracil
  modified_base 1406: mod_base = OTHER; note = N1-methylpseudouracil
  modified_base 1412: mod_base = OTHER; note = N1-methylpseudouracil
  modified_base 1413: mod_base = OTHER; note = N1-methylpseudouracil
  modified_base 1419: mod_base = OTHER; note = N1-methylpseudouracil
  modified_base 1432: mod_base = OTHER; note = N1-methylpseudouracil
  modified_base 1435: mod_base = OTHER; note = N1-methylpseudouracil
  modified_base 1440: mod_base = OTHER; note = N1-methylpseudouracil
  modified_base 1441: mod_base = OTHER; note = N1-methylpseudouracil
  modified_base 1444: mod_base = OTHER; note = N1-methylpseudouracil
  modified_base 1452: mod_base = OTHER; note = N1-methylpseudouracil
  modified_base 1460: mod_base = OTHER; note = N1-methylpseudouracil
  modified_base 1463: mod_base = OTHER; note = N1-methylpseudouracil
  modified_base 1465: mod_base = OTHER; note = N1-methylpseudouracil
  modified_base 1466: mod_base = OTHER; note = N1-methylpseudouracil
  modified_base 1467: mod_base = OTHER; note = N1-methylpseudouracil
  modified_base 1471: mod_base = OTHER; note = N1-methylpseudouracil
  modified_base 1476: mod_base = OTHER; note = N1-methylpseudouracil
  modified_base 1478: mod_base = OTHER; note = N1-methylpseudouracil
  modified_base 1482: mod_base = OTHER; note = N1-methylpseudouracil
ggaaataagagagaaaagaagagtaagaagaaatataagaccccggcgccgccaccatgagcggctgccccttcctcggcaacaacttcggctacaccttcaagaagctgcccgtggagggcagcgaggaggacaagagccagaccggcgtgaaccgggccagcaagggaggcctgatctacggcaactacctgcacctggagaaggtgctgaacgcccaggagctgcagagcgagaccaagggcaacaagatccacgacgagcacctgttcatcatcacccaccaggcctacgagctgtggttcaagcagatcctgtgggagctggacagcgtgcgggagatcttccagaacggccacgtgcgggacgagcggaacatgctgaaggtggtgagccggatgcaccgggtgagcgtgatcctgaagctgctggtgcagcagttcagcatcctggagaccatgaccgccctggacttcaacgacttccgggagtacttaagccccgcctccggctttcagagcctgcagttccggctgctggagaacaagatcggcgtgctgcagaacatgcgggtgccctacaaccggcggcactaccgggacaacttcaagggcgaggagaacgagctgctgctaaagagcgagcaggagaagaccctgctggagctggtggaggcctggctggagcggacacccggcctggaaccccacggcttcaacttctggggcaagctggagaagaacatcacccggggactggaggaggagttcatccggatccaggccaaggaggagagcgaagagaaggaggagcaggtggccgagttccagaagcagaaggaggtgctgctgagcctgttcgacgagaagcggcacgagcatcttctgtcgaagggcgaacggcggctgagctatcgggccctgcaaggagccctgatgatctacttctaccgggaggagccccggttccaggtgcccttccagctgctgaccagcctgatggacatcgatagcctgatgaccaagtggcggtacaaccacgtgtgcatggtgcaccggatgctgggcagcaaggccggcaccggaggaagcagcggctaccactacctgcggagcaccgtgagcgaccggtacaaggtgttcgtggacctgttcaacctgagcacctacctgattccccggcactggatccccaagatgaaccccaccatccacaagttcctgtacaccgccgagtactgcgacagcagctacttcagcagcgacgaatcagacggcggcggtggaggatcaggaggcggcggaagctaccggctgaagaagatcagcaaggaagagaagactcccggctgcgtgaagatcaagaagtgctgataataggctggagcctcggtggcctagcttcttgccccttgggcctccccccagcccctcctccccttcctgcacccgtacccccgtggtctttgaataaagtctgagtgggcggc

SEQ ID NO: 331 - RNA, 1453 nt, synthetic construct
  source 1..1453: mol_type = other RNA
  modified_base 6: mod_base = OTHER; note = N1-methylpseudouracil
  modified_base 24: mod_base = OTHER; note = N1-methylpseudouracil
  modified_base 34: mod_base = OTHER; note = N1-methylpseudouracil
  modified_base 36: mod_base = OTHER; note = N1-methylpseudouracil
  modified_base 58: mod_base = OTHER; note = N1-methylpseudouracil
  modified_base 80: mod_base = OTHER; note = N1-methylpseudouracil
  modified_base 89: mod_base = OTHER; note = N1-methylpseudouracil
  modified_base 114: mod_base = OTHER; note = N1-methylpseudouracil
  modified_base 123: mod_base = OTHER; note = N1-methylpseudouracil
  modified_base 129: mod_base = OTHER; note = N1-methylpseudouracil
  modified_base 130: mod_base = OTHER; note = N1-methylpseudouracil
  modified_base 133: mod_base = OTHER; note = N1-methylpseudouracil
  modified_base 144: mod_base = OTHER; note = N1-methylpseudouracil
  modified_base 145: mod_base = OTHER; note = N1-methylpseudouracil
  modified_base 150: mod_base = OTHER; note = N1-methylpseudouracil
  modified_base 156: mod_base = OTHER; note = N1-methylpseudouracil
  modified_base 157: mod_base = OTHER; note = N1-methylpseudouracil
  modified_base 166: mod_base = OTHER; note = N1-methylpseudouracil
  modified_base 172: mod_base = OTHER; note = N1-methylpseudouracil
  modified_base 208: mod_base = OTHER; note = N1-methylpseudouracil
  modified_base 232: mod_base = OTHER; note = N1-methylpseudouracil
  modified_base 235: mod_base = OTHER; note = N1-methylpseudouracil
  modified_base 237: mod_base = OTHER; note = N1-methylpseudouracil
  modified_base 246: mod_base = OTHER; note = N1-methylpseudouracil
  modified_base 250: mod_base = OTHER; note = N1-methylpseudouracil
  modified_base 256: mod_base = OTHER; note = N1-methylpseudouracil
  modified_base 265: mod_base = OTHER; note = N1-methylpseudouracil
  modified_base 268: mod_base = OTHER; note = N1-methylpseudouracil
  modified_base 283: mod_base = OTHER; note = N1-methylpseudouracil
  modified_base 310: mod_base = OTHER; note = N1-methylpseudouracil
  modified_base 325: mod_base = OTHER; note = N1-methylpseudouracil
  modified_base 327: mod_base = OTHER; note = N1-methylpseudouracil
  modified_base 328: mod_base = OTHER; note = N1-methylpseudouracil
  modified_base 331: mod_base = OTHER; note = N1-methylpseudouracil
  modified_base 334: mod_base = OTHER; note = N1-methylpseudouracil
  modified_base 348: mod_base = OTHER; note = N1-methylpseudouracil
  modified_base 355: mod_base = OTHER; note = N1-methylpseudouracil
  modified_base 357: mod_base = OTHER; note = N1-methylpseudouracil
  modified_base 360: mod_base = OTHER; note = N1-methylpseudouracil
  modified_base 361: mod_base = OTHER; note = N1-methylpseudouracil
  modified_base 370: mod_base = OTHER; note = N1-methylpseudouracil
  modified_base 373: mod_base = OTHER; note = N1-methylpseudouracil
  modified_base 375: mod_base = OTHER; note = N1-methylpseudouracil
  modified_base 382: mod_base = OTHER; note = N1-methylpseudouracil
  modified_base 391: mod_base = OTHER; note = N1-methylpseudouracil
  modified_base 400: mod_base = OTHER; note = N1-methylpseudouracil
  modified_base 402: mod_base = OTHER; note = N1-methylpseudouracil
  modified_base 403: mod_base = OTHER; note = N1-methylpseudouracil
  modified_base 418: mod_base = OTHER; note = N1-methylpseudouracil
  modified_base 436: mod_base = OTHER; note = N1-methylpseudouracil
  modified_base 439: mod_base = OTHER; note = N1-methylpseudouracil
  modified_base 445: mod_base = OTHER; note = N1-methylpseudouracil
  modified_base 448: mod_base = OTHER; note = N1-methylpseudouracil
  modified_base 457: mod_base = OTHER; note = N1-methylpseudouracil
  modified_base 466: mod_base = OTHER; note = N1-methylpseudouracil
  modified_base 472: mod_base = OTHER; note = N1-methylpseudouracil
  modified_base 475: mod_base = OTHER; note = N1-methylpseudouracil
  modified_base 478: mod_base = OTHER; note = N1-methylpseudouracil
  modified_base 484: mod_base = OTHER; note = N1-methylpseudouracil
  modified_base 487: mod_base = OTHER; note = N1-methylpseudouracil
  modified_base 490: mod_base = OTHER; note = N1-methylpseudouracil
  modified_base 498: mod_base = OTHER; note = N1-methylpseudouracil
  modified_base 499: mod_base = OTHER; note = N1-methylpseudouracil
  modified_base 505: mod_base = OTHER; note = N1-methylpseudouracil
  modified_base 508: mod_base = OTHER; note = N1-methylpseudouracil
  modified_base 517: mod_base = OTHER; note = N1-methylpseudouracil
  modified_base 526: mod_base = OTHER; note = N1-methylpseudouracil
  modified_base 531: mod_base = OTHER; note = N1-methylpseudouracil
  modified_base 532: mod_base = OTHER; note = N1-methylpseudouracil
  modified_base 540: mod_base = OTHER; note = N1-methylpseudouracil
  modified_base 541: mod_base = OTHER; note = N1-methylpseudouracil
  modified_base 549: mod_base = OTHER; note = N1-methylpseudouracil
  modified_base 552: mod_base = OTHER; note = N1-methylpseudouracil
  modified_base 553: mod_base = OTHER; note = N1-methylpseudouracil
  modified_base 564: mod_base = OTHER; note = N1-methylpseudouracil
  modified_base 570: mod_base = OTHER; note = N1-methylpseudouracil
  modified_base 571: mod_base = OTHER; note = N1-methylpseudouracil
  modified_base 572: mod_base = OTHER; note = N1-methylpseudouracil
  modified_base 580: mod_base = OTHER; note = N1-methylpseudouracil
  modified_base 585: mod_base = OTHER; note = N1-methylpseudouracil
  modified_base 586: mod_base = OTHER; note = N1-methylpseudouracil
  modified_base 592: mod_base = OTHER; note = N1-methylpseudouracil
  modified_base 595: mod_base = OTHER; note = N1-methylpseudouracil
  modified_base 607: mod_base = OTHER; note = N1-methylpseudouracil
  modified_base 613: mod_base = OTHER; note = N1-methylpseudouracil
  modified_base 616: mod_base = OTHER; note = N1-methylpseudouracil
  modified_base 625: mod_base = OTHER; note = N1-methylpseudouracil
  modified_base 631: mod_base = OTHER; note = N1-methylpseudouracil
  modified_base 636: mod_base = OTHER; note = N1-methylpseudouracil
  modified_base 651: mod_base = OTHER; note = N1-methylpseudouracil
  modified_base 663: mod_base = OTHER; note = N1-methylpseudouracil
  modified_base 664: mod_base = OTHER; note = N1-methylpseudouracil
  modified_base 685: mod_base = OTHER; note = N1-methylpseudouracil
  modified_base 688: mod_base = OTHER; note = N1-methylpseudouracil
  modified_base 691: mod_base = OTHER; note = N1-methylpseudouracil
  modified_base 715: mod_base = OTHER; note = N1-methylpseudouracil
  modified_base 718: mod_base = OTHER; note = N1-methylpseudouracil
  modified_base 724: mod_base = OTHER; note = N1-methylpseudouracil
  modified_base 727: mod_base = OTHER; note = N1-methylpseudouracil
  modified_base 735: mod_base = OTHER; note = N1-methylpseudouracil
  modified_base 739: mod_base = OTHER; note = N1-methylpseudouracil
  modified_base 757: mod_base = OTHER; note = N1-methylpseudouracil
  modified_base 771: mod_base = OTHER; note = N1-methylpseudouracil
  modified_base 772: mod_base = OTHER; note = N1-methylpseudouracil
  modified_base 777: mod_base = OTHER; note = N1-methylpseudouracil
  modified_base 778: mod_base = OTHER; note = N1-methylpseudouracil
  modified_base 780: mod_base = OTHER; note = N1-methylpseudouracil
  modified_base 790: mod_base = OTHER; note = N1-methylpseudouracil
  modified_base 802: mod_base = OTHER; note = N1-methylpseudouracil
  modified_base 814: mod_base = OTHER; note = N1-methylpseudouracil
  modified_base 825: mod_base = OTHER; note = N1-methylpseudouracil
  modified_base 826: mod_base = OTHER; note = N1-methylpseudouracil
  modified_base 829: mod_base = OTHER; note = N1-methylpseudouracil
  modified_base 835: mod_base = OTHER; note = N1-methylpseudouracil
  modified_base 874: mod_base = OTHER; note = N1-methylpseudouracil
  modified_base 882: mod_base = OTHER; note = N1-methylpseudouracil
  modified_base 883: mod_base = OTHER; note = N1-methylpseudouracil
  modified_base 901: mod_base = OTHER; note = N1-methylpseudouracil
  modified_base 904: mod_base = OTHER; note = N1-methylpseudouracil
  modified_base 907: mod_base = OTHER; note = N1-methylpseudouracil
  modified_base 913: mod_base = OTHER; note = N1-methylpseudouracil
  modified_base 915: mod_base = OTHER; note = N1-methylpseudouracil
  modified_base 916: mod_base = OTHER; note = N1-methylpseudouracil
  modified_base 938: mod_base = OTHER; note = N1-methylpseudouracil
  modified_base 940: mod_base = OTHER; note = N1-methylpseudouracil
  modified_base 941: mod_base = OTHER; note = N1-methylpseudouracil
  modified_base 943: mod_base = OTHER; note = N1-methylpseudouracil
  modified_base 945: mod_base = OTHER; note = N1-methylpseudouracil
  modified_base 964: mod_base = OTHER; note = N1-methylpseudouracil
  modified_base 969: mod_base = OTHER; note = N1-methylpseudouracil
  modified_base 971: mod_base = OTHER; note = N1-methylpseudouracil
  modified_base 979: mod_base = OTHER; note = N1-methylpseudouracil
  modified_base 991: mod_base = OTHER; note = N1-methylpseudouracil
  modified_base 994: mod_base = OTHER; note = N1-methylpseudouracil
  modified_base 997: mod_base = OTHER; note = N1-methylpseudouracil
  modified_base 999: mod_base = OTHER; note = N1-methylpseudouracil
  modified_base 1002: mod_base = OTHER; note = N1-methylpseudouracil
  modified_base 1003: mod_base = OTHER; note = N1-methylpseudouracil
  modified_base 1005: mod_base = OTHER; note = N1-methylpseudouracil
  modified_base 1023: mod_base = OTHER; note = N1-methylpseudouracil
  modified_base 1024: mod_base = OTHER; note = N1-methylpseudouracil
  modified_base 1030: mod_base = OTHER; note = N1-methylpseudouracil
  modified_base 1035: mod_base = OTHER; note = N1-methylpseudouracil
  modified_base 1036: mod_base = OTHER; note = N1-methylpseudouracil
  modified_base 1042: mod_base = OTHER; note = N1-methylpseudouracil
  modified_base 1045: mod_base = OTHER; note = N1-methylpseudouracil
  modified_base 1054: mod_base = OTHER; note = N1-methylpseudouracil
  modified_base 1057: mod_base = OTHER; note = N1-methylpseudouracil
  modified_base 1063: mod_base = OTHER; note = N1-methylpseudouracil
  modified_base 1067: mod_base = OTHER; note = N1-methylpseudouracil
  modified_base 1072: mod_base = OTHER; note = N1-methylpseudouracil
  modified_base 1075: mod_base = OTHER; note = N1-methylpseudouracil
  modified_base 1083: mod_base = OTHER; note = N1-methylpseudouracil
  modified_base 1089: mod_base = OTHER; note = N1-methylpseudouracil
  modified_base 1099: mod_base = OTHER; note = N1-methylpseudouracil
  modified_base 1101: mod_base = OTHER; note = N1-methylpseudouracil
  modified_base 1105: mod_base = OTHER; note = N1-methylpseudouracil
  modified_base 1108: mod_base = OTHER; note = N1-methylpseudouracil
  modified_base 1117: mod_base = OTHER; note = N1-methylpseudouracil
  modified_base 1120: mod_base = OTHER; note = N1-methylpseudouracil
  modified_base 1155: mod_base = OTHER; note = N1-methylpseudouracil
  modified_base 1161: mod_base = OTHER; note = N1-methylpseudouracil
  modified_base 1165: mod_base = OTHER; note = N1-methylpseudouracil
  modified_base 1177: mod_base = OTHER; note = N1-methylpseudouracil
  modified_base 1188: mod_base = OTHER; note = N1-methylpseudouracil
  modified_base 1195: mod_base = OTHER; note = N1-methylpseudouracil
  modified_base 1197: mod_base = OTHER; note = N1-methylpseudouracil
  modified_base 1198: mod_base = OTHER; note = N1-methylpseudouracil
  modified_base 1201: mod_base = OTHER; note = N1-methylpseudouracil
  modified_base 1207: mod_base = OTHER; note = N1-methylpseudouracil
  modified_base 1209: mod_base = OTHER; note = N1-methylpseudouracil
  modified_base 1210: mod_base = OTHER; note = N1-methylpseudouracil
  modified_base 1216: mod_base = OTHER; note = N1-methylpseudouracil
  modified_base 1224: mod_base = OTHER; note = N1-methylpseudouracil
  modified_base 1228: mod_base = OTHER; note = N1-methylpseudouracil
  modified_base 1231: mod_base = OTHER; note = N1-methylpseudouracil
  modified_base 1232: mod_base = OTHER; note = N1-methylpseudouracil
  modified_base 1242: mod_base = OTHER; note = N1-methylpseudouracil
  modified_base 1246: mod_base = OTHER; note = N1-methylpseudouracil
  modified_base 1255: mod_base = OTHER; note = N1-methylpseudouracil
  modified_base 1267: mod_base = OTHER; note = N1-methylpseudouracil
  modified_base 1275: mod_base = OTHER; note = N1-methylpseudouracil
  modified_base 1276: mod_base = OTHER; note = N1-methylpseudouracil
  modified_base 1279: mod_base = OTHER; note = N1-methylpseudouracil
  modified_base 1281: mod_base = OTHER; note = N1-methylpseudouracil
  modified_base 1293: mod_base = OTHER; note = N1-methylpseudouracil
  modified_base 1296: mod_base = OTHER; note = N1-methylpseudouracil
  modified_base 1308: mod_base = OTHER; note = N1-methylpseudouracil
  modified_base 1311: mod_base = OTHER; note = N1-methylpseudouracil
  modified_base 1312: mod_base = OTHER; note = N1-methylpseudouracil
  modified_base 1326: mod_base = OTHER; note = N1-methylpseudouracil
  modified_base 1335: mod_base = OTHER; note = N1-methylpseudouracil
  modified_base 1338: mod_base = OTHER; note = N1-methylpseudouracil
  modified_base 1341: mod_base = OTHER; note = N1-methylpseudouracil
  modified_base 1346: mod_base = OTHER; note = N1-methylpseudouracil
  modified_base 1353: mod_base = OTHER; note = N1-methylpseudouracil
  modified_base 1357: mod_base = OTHER; note = N1-methylpseudouracil
  modified_base 1362: mod_base = OTHER; note = N1-methylpseudouracil
  modified_base 1366: mod_base = OTHER; note = N1-methylpseudouracil
  modified_base 1367: mod_base = OTHER; note = N1-methylpseudouracil
  modified_base 1369: mod_base = OTHER; note = N1-methylpseudouracil
  modified_base 1370: mod_base = OTHER; note = N1-methylpseudouracil
  modified_base 1376: mod_base = OTHER; note = N1-methylpseudouracil
  modified_base 1377: mod_base = OTHER; note = N1-methylpseudouracil
  modified_base 1383: mod_base = OTHER; note = N1-methylpseudouracil
  modified_base 1396: mod_base = OTHER; note = N1-methylpseudouracil
  modified_base 1399: mod_base = OTHER; note = N1-methylpseudouracil
  modified_base 1404: mod_base = OTHER; note = N1-methylpseudouracil
  modified_base 1405: mod_base = OTHER; note = N1-methylpseudouracil
  modified_base 1408: mod_base = OTHER; note = N1-methylpseudouracil
  modified_base 1416: mod_base = OTHER; note = N1-methylpseudouracil
  modified_base 1424: mod_base = OTHER; note = N1-methylpseudouracil
  modified_base 1427: mod_base = OTHER; note = N1-methylpseudouracil
  modified_base 1429: mod_base = OTHER; note = N1-methylpseudouracil
  modified_base 1430: mod_base = OTHER; note = N1-methylpseudouracil
  modified_base 1431: mod_base = OTHER; note = N1-methylpseudouracil
  modified_base 1435: mod_base = OTHER; note = N1-methylpseudouracil
  modified_base 1440: mod_base = OTHER; note = N1-methylpseudouracil
  modified_base 1442: mod_base = OTHER; note = N1-methylpseudouracil
  modified_base 1446: mod_base = OTHER; note = N1-methylpseudouracil
ggaaataagagagaaaagaagagtaagaagaaatataagaccccggcgccgccaccatgggcagcagcaagagcaagcctaaggaccctagccagagaagaagaggcggaggctccagcggctgccccttcctcggcaacaacttcggctacaccttcaagaagctgcccgtggagggcagcgaggaggacaagagccagaccggcgtgaaccgggccagcaagggaggcctgatctacggcaactacctgcacctggagaaggtgctgaacgcccaggagctgcagagcgagaccaagggcaacaagatccacgacgagcacctgttcatcatcacccaccaggcctacgagctgtggttcaagcagatcctgtgggagctggacagcgtgcgggagatcttccagaacggccacgtgcgggacgagcggaacatgctgaaggtggtgagccggatgcaccgggtgagcgtgatcctgaagctgctggtgcagcagttcagcatcctggagaccatgaccgccctggacttcaacgacttccgggagtacttaagccccgcctccggctttcagagcctgcagttccggctgctggagaacaagatcggcgtgctgcagaacatgcgggtgccctacaaccggcggcactaccgggacaacttcaagggcgaggagaacgagctgctgctaaagagcgagcaggagaagaccctgctggagctggtggaggcctggctggagcggacacccggcctggaaccccacggcttcaacttctggggcaagctggagaagaacatcacccggggactggaggaggagttcatccggatccaggccaaggaggagagcgaagagaaggaggagcaggtggccgagttccagaagcagaaggaggtgctgctgagcctgttcgacgagaagcggcacgagcatcttctgtcgaagggcgaacggcggctgagctatcgggccctgcaaggagccctgatgatctacttctaccgggaggagccccggttccaggtgcccttccagctgctgaccagcctgatggacatcgatagcctgatgaccaagtggcggtacaaccacgtgtgcatggtgcaccggatgctgggcagcaaggccggcaccggaggaagcagcggctaccactacctgcggagcaccgtgagcgaccggtacaaggtgttcgtggacctgttcaacctgagcacctacctgattccccggcactggatccccaagatgaaccccaccatccacaagttcctgtacaccgccgagtactgcgacagcagctacttcagcagcgacgaatcagacggctgataataggctggagcctcggtggcctagcttcttgccccttgggcctccccccagcccctcctccccttcctgcacccgtacccccgtggtctttgaataaagtctgagtgggcggc

SEQ ID NO: 332 - RNA, 1425 nt, synthetic construct
  source 1..1425: mol_type = other RNA
  modified_base 6: mod_base = OTHER; note = N1-methylpseudouracil
  modified_base 24: mod_base = OTHER; note = N1-methylpseudouracil
  modified_base 34: mod_base = OTHER; note = N1-methylpseudouracil
  modified_base 36: mod_base = OTHER; note = N1-methylpseudouracil
  modified_base 48: mod_base = OTHER; note = N1-methylpseudouracil
  modified_base 51: mod_base = OTHER; note = N1-methylpseudouracil
  modified_base 56: mod_base = OTHER; note = N1-methylpseudouracil
  modified_base 57: mod_base = OTHER; note = N1-methylpseudouracil
  modified_base 62: mod_base = OTHER; note = N1-methylpseudouracil
  modified_base 65: mod_base = OTHER; note = N1-methylpseudouracil
  modified_base 84: mod_base = OTHER; note = N1-methylpseudouracil
  modified_base 87: mod_base = OTHER; note = N1-methylpseudouracil
  modified_base 94: mod_base = OTHER; note = N1-methylpseudouracil
  modified_base 103: mod_base = OTHER; note = N1-methylpseudouracil
  modified_base 108: mod_base = OTHER; note = N1-methylpseudouracil
  modified_base 120: mod_base = OTHER; note = N1-methylpseudouracil
  modified_base 124: mod_base = OTHER; note = N1-methylpseudouracil
  modified_base 126: mod_base = OTHER; note = N1-methylpseudouracil
  modified_base 132: mod_base = OTHER; note = N1-methylpseudouracil
  modified_base 133: mod_base = OTHER; note = N1-methylpseudouracil
  modified_base 140: mod_base = OTHER; note = N1-methylpseudouracil
  modified_base 147: mod_base = OTHER; note = N1-methylpseudouracil
  modified_base 158: mod_base = OTHER; note = N1-methylpseudouracil
  modified_base 164: mod_base = OTHER; note = N1-methylpseudouracil
  modified_base 165: mod_base = OTHER; note = N1-methylpseudouracil
  modified_base 168: mod_base = OTHER; note = N1-methylpseudouracil
  modified_base 170: mod_base = OTHER; note = N1-methylpseudouracil
  modified_base 171: mod_base = OTHER; note = N1-methylpseudouracil
  modified_base 182: mod_base = OTHER; note = N1-methylpseudouracil
  modified_base 183: mod_base = OTHER; note = N1-methylpseudouracil
  modified_base 192: mod_base = OTHER; note = N1-methylpseudouracil
  modified_base 203: mod_base = OTHER; note = N1-methylpseudouracil
  modified_base 211: mod_base = OTHER; note = N1-methylpseudouracil
  modified_base 212: mod_base = OTHER; note = N1-methylpseudouracil
  modified_base 216: mod_base = OTHER; note = N1-methylpseudouracil
  modified_base 222: mod_base = OTHER; note = N1-methylpseudouracil
  modified_base 234: mod_base = OTHER; note = N1-methylpseudouracil
  modified_base 238: mod_base = OTHER; note = N1-methylpseudouracil
  modified_base 243: mod_base = OTHER; note = N1-methylpseudouracil
  modified_base 246: mod_base = OTHER; note = N1-methylpseudouracil
  modified_base 261: mod_base = OTHER; note = N1-methylpseudouracil
  modified_base 273: mod_base = OTHER; note = N1-methylpseudouracil
  modified_base 282: mod_base = OTHER; note = N1-methylpseudouracil
  modified_base 286: mod_base = OTHER; note = N1-methylpseudouracil
  modified_base 288: mod_base = OTHER; note = N1-methylpseudouracil
  modified_base 291: mod_base = OTHER; note = N1-methylpseudouracil
  modified_base 296: mod_base = OTHER; note = N1-methylpseudouracil
  modified_base 302: mod_base = OTHER; note = N1-methylpseudouracil
  modified_base 303: mod_base = OTHER; note = N1-methylpseudouracil
  modified_base 306: mod_base = OTHER; note = N1-methylpseudouracil
  modified_base 330: mod_base = OTHER; note = N1-methylpseudouracil
  modified_base 339: mod_base = OTHER; note = N1-methylpseudouracil
  modified_base 342: mod_base = OTHER; note = N1-methylpseudouracil
  modified_base 345: mod_base = OTHER; note = N1-methylpseudouracil
  modified_base 350: mod_base = OTHER; note = N1-methylpseudouracil
  modified_base 351: mod_base = OTHER; note = N1-methylpseudouracil
  modified_base 354: mod_base = OTHER; note = N1-methylpseudouracil
  modified_base 360: mod_base = OTHER; note = N1-methylpseudouracil
  modified_base 365: mod_base = OTHER; note = N1-methylpseudouracil
  modified_base 369: mod_base = OTHER; note = N1-methylpseudouracil
  modified_base 371: mod_base = OTHER; note = N1-methylpseudouracil
  modified_base 394: mod_base = OTHER; note = N1-methylpseudouracil
  modified_base 402: mod_base = OTHER; note = N1-methylpseudouracil
  modified_base 405: mod_base = OTHER; note = N1-methylpseudouracil
  modified_base 409: mod_base = OTHER; note = N1-methylpseudouracil
  modified_base 417: mod_base = OTHER; note = N1-methylpseudouracil
  modified_base 423: mod_base = OTHER; note = N1-methylpseudouracil
  modified_base 427: mod_base = OTHER; note = N1-methylpseudouracil
  modified_base 428: mod_base = OTHER; note = N1-methylpseudouracil
  modified_base 429: mod_base = OTHER; note = N1-methylpseudouracil
  modified_base 432: mod_base = OTHER; note = N1-methylpseudouracil
  modified_base 438: mod_base = OTHER; note = N1-methylpseudouracil
  modified_base 450: mod_base = OTHER; note = N1-methylpseudouracil
  modified_base 456: mod_base = OTHER; note = N1-methylpseudouracil
  modified_base 460: mod_base = OTHER; note = N1-methylpseudouracil
  modified_base 463: mod_base = OTHER; note = N1-methylpseudouracil
  modified_base 465: mod_base = OTHER; note = N1-methylpseudouracil
  modified_base 468: mod_base = OTHER; note = N1-methylpseudouracil
  modified_base 471: mod_base = OTHER; note = N1-methylpseudouracil
  modified_base 481: mod_base = OTHER; note = N1-methylpseudouracil
  modified_base 483: mod_base = OTHER; note = N1-methylpseudouracil
  modified_base 484: mod_base = OTHER; note = N1-methylpseudouracil
  modified_base 486: mod_base = OTHER; note = N1-methylpseudouracil
  modified_base 488: mod_base = OTHER; note = N1-methylpseudouracil
  modified_base 489: mod_base = OTHER; note = N1-methylpseudouracil
  modified_base 497: mod_base = OTHER; note = N1-methylpseudouracil
  modified_base 514: mod_base = OTHER; note = N1-methylpseudouracil
  modified_base 521: mod_base = OTHER; note = N1-methylpseudouracil
  modified_base 522: mod_base = OTHER; note = N1-methylpseudouracil
  modified_base 524: mod_base = OTHER; note = N1-methylpseudouracil
  modified_base 525: mod_base = OTHER; note = N1-methylpseudouracil
  modified_base 531: mod_base = OTHER; note = N1-methylpseudouracil
  modified_base 540: mod_base = OTHER; note = N1-methylpseudouracil
  modified_base 549: mod_base = OTHER; note = N1-methylpseudouracil
  modified_base 552: mod_base = OTHER; note = N1-methylpseudouracil
  modified_base 553: mod_base = OTHER; note = N1-methylpseudouracil
  modified_base 557: mod_base = OTHER; note = N1-methylpseudouracil
  modified_base 558: mod_base = OTHER; note = N1-methylpseudouracil
  modified_base 562: mod_base = OTHER; note = N1-methylpseudouracil
  modified_base 576: mod_base = OTHER; note = N1-methylpseudouracil
  modified_base 584: mod_base = OTHER; note = N1-methylpseudouracil
  modified_base 585: mod_base = OTHER; note = N1-methylpseudouracil
  modified_base 588: mod_base = OTHER; note = N1-methylpseudouracil
  modified_base 591: mod_base = OTHER; note = N1-methylpseudouracil
  modified_base 594: mod_base = OTHER; note = N1-methylpseudouracil
  modified_base 603: mod_base = OTHER; note = N1-methylpseudouracil
  modified_base 606: mod_base = OTHER; note = N1-methylpseudouracil
  modified_base 621: mod_base = OTHER; note = N1-methylpseudouracil
  modified_base 625: mod_base = OTHER; note = N1-methylpseudouracil
  modified_base 630: mod_base = OTHER; note = N1-methylpseudouracil
  modified_base 639: mod_base = OTHER; note = N1-methylpseudouracil
  modified_base 642: mod_base = OTHER; note = N1-methylpseudouracil
  modified_base 660: mod_base = OTHER; note = N1-methylpseudouracil
  modified_base 663: mod_base = OTHER; note = N1-methylpseudouracil
  modified_base 670: mod_base = OTHER; note = N1-methylpseudouracil
  modified_base 684: mod_base = OTHER; note = N1-methylpseudouracil
  modified_base 687: mod_base = OTHER; note = N1-methylpseudouracil
  modified_base 688: mod_base = OTHER; note = N1-methylpseudouracil
  modified_base 694: mod_base = OTHER; note = N1-methylpseudouracil
  modified_base 696: mod_base = OTHER; note = N1-methylpseudouracil
  modified_base 705: mod_base = OTHER; note = N1-methylpseudouracil
  modified_base 711: mod_base = OTHER; note = N1-methylpseudouracil
  modified_base 717: mod_base = OTHER; note = N1-methylpseudouracil
  modified_base 726: mod_base = OTHER; note = N1-methylpseudouracil
  modified_base 738: mod_base = OTHER; note = N1-methylpseudouracil
  modified_base 747: mod_base = OTHER; note = N1-methylpseudouracil
  modified_base 755: mod_base = OTHER; note = N1-methylpseudouracil
  modified_base 759: mod_base = OTHER; note = N1-methylpseudouracil
  modified_base 763: mod_base = OTHER; note = N1-methylpseudouracil
  modified_base 766: mod_base = OTHER; note = N1-methylpseudouracil
  modified_base 769: mod_base = OTHER; note = N1-methylpseudouracil
  modified_base 771: mod_base = OTHER; note = N1-methylpseudouracil
  modified_base 773: mod_base = OTHER; note = N1-methylpseudouracil
  modified_base 774: mod_base = OTHER; note = N1-methylpseudouracil
  modified_base 776: mod_base = OTHER; note = N1-methylpseudouracil
  modified_base 786: mod_base = OTHER; note = N1-methylpseudouracil
  modified_base 792: mod_base = OTHER; note = N1-methylpseudouracil
  modified_base 794: mod_base = OTHER; note = N1-methylpseudouracil
  modified_base 795: mod_base = OTHER; note = N1-methylpseudouracil
  modified_base 798: mod_base = OTHER; note = N1-methylpseudouracil
  modified_base 806: mod_base = OTHER; note = N1-methylpseudouracil
  modified_base 820: mod_base = OTHER; note = N1-methylpseudouracil
  modified_base 825: mod_base = OTHER; note = N1-methylpseudouracil
  modified_base 829: mod_base = OTHER; note = N1-methylpseudouracil
  modified_base 837: mod_base = OTHER; note = N1-methylpseudouracil
  modified_base 840: mod_base = OTHER; note = N1-methylpseudouracil
  modified_base 842: mod_base = OTHER; note = N1-methylpseudouracil
  modified_base 852: mod_base = OTHER; note = N1-methylpseudouracil
  modified_base 865: mod_base = OTHER; note = N1-methylpseudouracil
  modified_base 867: mod_base = OTHER; note = N1-methylpseudouracil
  modified_base 872: mod_base = OTHER; note = N1-methylpseudouracil
  modified_base 903: mod_base = OTHER; note = N1-methylpseudouracil
  modified_base 906: mod_base = OTHER; note = N1-methylpseudouracil
  modified_base 914: mod_base = OTHER; note = N1-methylpseudouracil
  modified_base 915: mod_base = OTHER; note = N1-methylpseudouracil
  modified_base 923: mod_base = OTHER; note = N1-methylpseudouracil
  modified_base 924: mod_base = OTHER; note = N1-methylpseudouracil
  modified_base 927: mod_base = OTHER; note = N1-methylpseudouracil
  modified_base 931: mod_base = OTHER; note = N1-methylpseudouracil
  modified_base 933: mod_base = OTHER; note = N1-methylpseudouracil
  modified_base 934: mod_base = OTHER; note = N1-methylpseudouracil
  modified_base 959: mod_base = OTHER; note = N1-methylpseudouracil
  modified_base 960: mod_base = OTHER; note = N1-methylpseudouracil
  modified_base 963: mod_base = OTHER; note = N1-methylpseudouracil
  modified_base 965: mod_base = OTHER; note = N1-methylpseudouracil
  modified_base 972: mod_base = OTHER; note = N1-methylpseudouracil
  modified_base 980: mod_base = OTHER; note = N1-methylpseudouracil
  modified_base 984: mod_base = OTHER; note = N1-methylpseudouracil
  modified_base 1004: mod_base = OTHER; note = N1-methylpseudouracil
  modified_base 1005: mod_base = OTHER; note = N1-methylpseudouracil
  modified_base 1008: mod_base = OTHER; note = N1-methylpseudouracil
  modified_base 1017: mod_base = OTHER; note = N1-methylpseudouracil
  modified_base 1030: mod_base = OTHER; note = N1-methylpseudouracil
  modified_base 1035: mod_base = OTHER; note = N1-methylpseudouracil
  modified_base 1043: mod_base = OTHER; note = N1-methylpseudouracil
  modified_base 1045: mod_base = OTHER; note = N1-methylpseudouracil
  modified_base 1047: mod_base = OTHER; note = N1-methylpseudouracil
  modified_base 1050: mod_base = OTHER; note = N1-methylpseudouracil
  modified_base 1071: mod_base = OTHER; note = N1-methylpseudouracil
  modified_base 1074: mod_base = OTHER; note = N1-methylpseudouracil
  modified_base 1082: mod_base = OTHER; note = N1-methylpseudouracil
  modified_base 1091: mod_base = OTHER; note = N1-methylpseudouracil
  modified_base 1093: mod_base = OTHER; note = N1-methylpseudouracil
  modified_base 1095: mod_base = OTHER; note = N1-methylpseudouracil
  modified_base 1096: mod_base = OTHER; note = N1-methylpseudouracil
  modified_base 1104: mod_base = OTHER; note = N1-methylpseudouracil
  modified_base 1113: mod_base = OTHER; note = N1-methylpseudouracil
  modified_base 1120: mod_base = OTHER; note = N1-methylpseudouracil
  modified_base 1121: mod_base = OTHER; note = N1-methylpseudouracil
  modified_base 1123: mod_base = OTHER; note = N1-methylpseudouracil
  modified_base 1128: mod_base = OTHER; note = N1-methylpseudouracil
  modified_base 1129: mod_base = OTHER; note = N1-methylpseudouracil
  modified_base 1132: mod_base = OTHER; note = N1-methylpseudouracil
  modified_base 1134: mod_base = OTHER; note = N1-methylpseudouracil
  modified_base 1137: mod_base = OTHER; note = N1-methylpseudouracil
  modified_base 1145: mod_base = OTHER; note = N1-methylpseudouracil
  modified_base 1149: mod_base = OTHER; note = N1-methylpseudouracil
  modified_base 1152: mod_base = OTHER; note = N1-methylpseudouracil
  modified_base 1194: mod_base = OTHER; note = N1-methylpseudouracil
  modified_base 1198: mod_base = OTHER; note = N1-methylpseudouracil
  modified_base 1204: mod_base = OTHER; note = N1-methylpseudouracil
  modified_base 1207: mod_base = OTHER; note = N1-methylpseudouracil
  modified_base 1215: mod_base = OTHER; note = N1-methylpseudouracil
  modified_base 1245: mod_base = OTHER; note = N1-methylpseudouracil
  modified_base 1248: mod_base = OTHER; note = N1-methylpseudouracil
  modified_base 1252: mod_base = OTHER; note = N1-methylpseudouracil
  modified_base 1253: mod_base = OTHER; note = N1-methylpseudouracil
  modified_base 1254: mod_base = OTHER; note = N1-methylpseudouracil
  modified_base 1257: mod_base = OTHER; note = N1-methylpseudouracil
  modified_base 1258: mod_base = OTHER; note = N1-methylpseudouracil
  modified_base 1266: mod_base = OTHER; note = N1-methylpseudouracil
  modified_base 1273: mod_base = OTHER; note = N1-methylpseudouracil
  modified_base 1281: mod_base = OTHER; note = N1-methylpseudouracil
  modified_base 1286: mod_base = OTHER; note = N1-methylpseudouracil
  modified_base 1290: mod_base = OTHER; note = N1-methylpseudouracil
  modified_base 1292: mod_base = OTHER; note = N1-methylpseudouracil
  modified_base 1293: mod_base = OTHER; note = N1-methylpseudouracil
  modified_base 1307: mod_base = OTHER; note = N1-methylpseudouracil
  modified_base 1310: mod_base = OTHER; note = N1-methylpseudouracil
  modified_base 1313: mod_base = OTHER; note = N1-methylpseudouracil
  modified_base 1318: mod_base = OTHER; note = N1-methylpseudouracil
  modified_base 1325: mod_base = OTHER; note = N1-methylpseudouracil
  modified_base 1329: mod_base = OTHER; note = N1-methylpseudouracil
  modified_base 1335: mod_base = OTHER; note = N1-methylpseudouracil
  modified_base 1338: mod_base = OTHER; note = N1-methylpseudouracil
  modified_base 1339: mod_base = OTHER; note = N1-methylpseudouracil
  modified_base 1341: mod_base = OTHER; note = N1-methylpseudouracil
  modified_base 1342: mod_base = OTHER; note = N1-methylpseudouracil
  modified_base 1348: mod_base = OTHER; note = N1-methylpseudouracil
  modified_base 1349: mod_base = OTHER; note = N1-methylpseudouracil
  modified_base 1355: mod_base = OTHER; note = N1-methylpseudouracil
  modified_base 1368: mod_base = OTHER; note = N1-methylpseudouracil
  modified_base 1371: mod_base = OTHER; note = N1-methylpseudouracil
  modified_base 1376: mod_base = OTHER; note = N1-methylpseudouracil
  modified_base 1377: mod_base = OTHER; note = N1-methylpseudouracil
  modified_base 1380: mod_base = OTHER; note = N1-methylpseudouracil
  modified_base 1388: mod_base = OTHER; note = N1-methylpseudouracil
  modified_base 1396: mod_base = OTHER; note = N1-methylpseudouracil
  modified_base 1399: mod_base = OTHER; note = N1-methylpseudouracil
  modified_base 1401: mod_base = OTHER; note = N1-methylpseudouracil
  modified_base 1402: mod_base = OTHER; note = N1-methylpseudouracil
  modified_base 1403: mod_base = OTHER; note = N1-methylpseudouracil
  modified_base 1407: mod_base = OTHER; note = N1-methylpseudouracil
  modified_base 1412: mod_base = OTHER; note = N1-methylpseudouracil
  modified_base 1414: mod_base = OTHER; note = N1-methylpseudouracil
  modified_base 1418: mod_base = OTHER; note = N1-methylpseudouracil
ggaaataagagagaaaagaagagtaagaagaaatataagagccaccatgctccacttccactactacgacaccagcaacaagatcatggagcctcacagacctaacgtgaagaccgccgtgcctctcagccttgagagctaccacatcagcgaggagtacggcttcctcttaccagacagcttgaaggaactaccggaccactacagaccttggatggagatcgccaacaagctgcctcagctgatcgacgcccaccagctgcaggcccacgtggacaagatgcctctgctgagctgccagttcctgaagggccacagagagcagagactggcccacctggtcctcagcttcctgaccatgggctacgtgtggcaggagggcgaggcccagcctgccgaggtgctgcctagaaacctggccctgcctttcgtggaggtgagccggaacctgggcctgcctcctatcctggtgcacagcgatcttgtcttgacaaactggaccaagaaggaccctgacggattcttggagataggcaacctggaaacaatcattagcttccctggcggcgagagcctgcacggcttcatcctcgtgaccgccctggtggagaaggaggcagtacctggcatcaaggccctcgtgcaggccaccaacgccatcctgcagcctaaccaggaggccctgcttcaagctctccagcgactccgcctgagcatccaggacatcaccaagaccctgggccagatgcacgactacgtcgatcctgatatcttctacgccggcatcagaatcttcctgagcggctggaaggacaaccctgccatgcctgccggcctgatgtacgagggcgtgagccaggagcctctgaagtacagcggcggcagcgccgcccagagcaccgtgctgcacgccttcgacgagttcctgggtattcgccacagcaaggagagcggcgacttcctgtacagaatgagagactacatgccgccaagccacaaggccttcatcgaggacatccacagcgcccctagcctccgggactatatcctgagcagcggccaggaccacctgctgaccgcctacaaccagtgtgttcaggccctagccgagctgagaagttatcacattactatggtgaccaagtacctgatcaccgccgcagcaaaggccaagcacggcaagccaaaccacctccctggacctcctcaggcgctcaaggacagaggcaccggcggcacagcggtaatgagtttccttaagagcgtgagagataagaccctagagtccatcttgcacccgcggggctgataataggctggagcctcggtggccatgcttcttgccccttgggcctccccccagcccctcctccccttcctgcacccgtacccccgtggtctttgaataaagtctgagtgggcggc

SEQ ID NO: 333-369 - skipped (37 entries)

SEQ ID NO: 370 - RNA, 120 nt, synthetic construct
  source 1..120: mol_type = other RNA
aaaaaaaaaaaaaaaaaaaaaaaaaaaaaaaaaaaaaaaaaaaaaaaaaaaaaaaaaaaaaaaaaaaaaaaaaaaaaaaaaaaaaaaaaaaaaaaaaaaaaaaaaaaaaaaaaaaaaaaa

SEQ ID NO: 371-499 - skipped (129 entries)

SEQ ID NO: 500 - protein, 15 aa, synthetic construct
GSSKSKPKDPSQRRR

SEQ ID NO: 501 - protein, 21 aa, synthetic construct
YRLKKISKEEKTPGCVKIKKC

SEQ ID NO: 502 - RNA, 100 nt, synthetic construct
  source 1..100: mol_type = other RNA
aaaaaaaaaaaaaaaaaaaaaaaaaaaaaaaaaaaaaaaaaaaaaaaaaaaaaaaaaaaaaaaaaaaaaaaaaaaaaaaaaaaaaaaaaaaaaaaaaaaa

SEQ ID NO: 503 - RNA, 120 nt, synthetic construct; identical to SEQ ID NO: 370
  source 1..120: mol_type = other RNA

SEQ ID NO: 504-699 - skipped (196 entries)

SEQ ID NO: 700 - protein, 403 aa, synthetic construct
MAHAMENSWTISKEYHIDEEVGFALPNPQENLPDFYNDWMFIAKHLPDLIESGQLRERVEKLNMLSIDHLTDHKSQRLARLVLGCITMAYVWGKGHGDVRKVLPRNIAVPYCQLSKKLELPPILVYADCVLANWKKKDPNKPLTYENMDVLFSFRDGDCSKGFFLVSLLVEIAAASAIKVIPTVFKAMQMQERDTLLKALLEIASCLEKALQVFHQIHDHVNPKAAFSVLRIYLSGWKGNPQLSDGLVYEGFWEDPKEFAGGSAGQSSVFQCFDVLLGIQQTAGGGHAAQFLQDMRRYMPPAHRNFLCSLESNPSVREFVLSKGDAGLREAYDACVKALVSLRSYHLQIVTKYILIPASQQPKENKTSEDPSKLEAKGTGGTDLMNFLKTVRSTTEKSLLKEG

SEQ ID NO: 701 - RNA, 1209 nt, synthetic construct
  source 1..1209: mol_type = other RNA
atggcccacgccatggagaacagctggaccatcagcaaggagtaccacatcgacgaggaggtgggcttcgccctgcctaaccctcaggagaacctgcctgacttctacaacgactggatgttcatcgccaagcacctgccagacctgatcgagagcggccagctgagagagagagtggagaagctgaacatgctgagcatcgaccacctgaccgaccacaagagccagagactggccagactggtgctgggctgcatcaccatggcctacgtgtggggcaagggccacggcgacgtgagaaaggtgctgcctagaaacatcgccgtgccttactgccagctgagcaagaagctggagctgcctcctatcctggtgtacgccgactgcgtgctggccaactggaagaagaaggaccctaacaagcctctgacctacgagaacatggacgtgctgttcagcttcagagacggcgactgcagcaagggcttcttcctggtgagcctgctggtggagatcgccgccgccagcgccatcaaggtgatccctaccgtgttcaaggccatgcagatgcaggagagagacaccctgctgaaggccctgctggaaatcgccagctgcctggagaaggcgctgcaggtgttccaccagatccacgaccacgtgaaccctaaggccgccttcagcgtgctgagaatctacctgagcggctggaagggcaaccctcagctgagcgacggtctagtctacgagggcttctgggaggaccctaaggagttcgctggtggctccgccggtcagagcagcgtgttccagtgcttcgacgtgctgctgggcatccaacagactgccggtggtggccacgccgcccagttcctgcaggacatgagaagatacatgcctcctgcccacagaaacttcctgtgcagcctggagagcaaccctagcgtgagagagttcgtgctgagcaagggcgacgccggcctgagagaggcctacgacgcctgcgtgaaggcgctggtgtccctgagaagctaccacctgcagatcgtgaccaagtacatcctgatccctgccagccagcagcctaaggagaacaagaccagcgaggaccctagcaagctggaggccaagggcaccggcggcaccgacctgatgaacttcctgaagaccgtgagaagcaccaccgagaagtctctgctcaaggagggc

SEQ ID NO: 702 - protein, 407 aa, synthetic construct
MALSKISPTEGSRRILEDHHIDEDVGFALPHPLVELPDAYSPWVLVARNLPVLIENGQLREEVEKLPTLSTDGLRGHRLQRLAHLALGYITMAYVWNRGDDDVRKVLPRNIAVPYCELSEKLGLPPILSYADCVLANWKKKDPNGPMTYENMDILFSFPGGDCDKGFFLVSLLVEIAASPAIKAIPTVSSAVERQDLKALEKALHDIATSLEKAKEIFKRMRDFVDPDTFFHVLRIYLSGWKCSSKLPEGLLYEGVWDTPKMFSGGSAGQSSIFQSLDVLLGIKHEAGKESPAEFLQEMREYMPPAHRNFLFFLESAPPVREFVISRHNEDLTKAYNECVNGLVSVRKFHLAIVDTYIMKPSKKKPTDGDKSEEPSNVESRGTGGTNPMTFLRSVKDTTEKALLSWP

SEQ ID NO: 703 - RNA, 1221 nt, synthetic construct
  source 1..1221: mol_type = other RNA
atggccctaagcaagatcagccctaccgagggcagcagaagaatccttgaggaccaccacatcgacgaggacgtgggcttcgccttgcctcaccctcttgtggagttgccggacgcctacagcccttgggtgcttgtggccagaaaccttcctgtgctgatcgagaacggccagctgagagaggaggtggagaagctgcctactctgagtaccgacggcctgagaggccacagactgcagagactggcccacctggccctgggctacatcaccatggcctacgtgtggaacagaggcgacgacgacgtgagaaaggtgctgcctagaaacatcgccgtgccttactgcgagctgagcgagaagctcggcctgcctcctatcctgagctacgccgactgcgtgctggccaactggaagaagaaggaccctaacggccctatgacctacgagaacatggacatcctgttcagcttccctggcggcgactgcgacaagggcttcttcctggtgagcctcctggtggaaatcgccgccagccctgccatcaaggccatccctaccgtgagcagcgccgtggagagacaggacctgaaggccctggagaaggcactccacgacatcgccaccagtctcgagaaggctaaggagatcttcaagagaatgagagacttcgtggaccctgacaccttcttccacgtgctgagaatctacctgagcggctggaagtgcagcagcaagttaccagagggcctgctgtacgagggcgtgtgggacacccctaagatgttcagcggcggttccgccggccagagcagcatcttccagagcctggacgtgctgctgggcatcaagcacgaggccggcaaggagtcccctgccgagttcctgcaggagatgagagagtacatgcctcctgcccacagaaacttcctgttcttcttggagagcgcccctcctgttcgcgaattcgtgatcagcagacacaacgaggatctcaccaaggcctacaacgagtgcgtgaacggtctggtgtccgtcagaaagttccatctcgcaatcgtggacacctacatcatgaagcctagcaagaagaagccgacggatggagacaagagcgaggaaccgagcaatgtcgaaagcagaggcaccggcggcaccaatccaatgacattcctgagaagcgtgaaggacaccactgagaaggcccttctgagctggcct

SEQ ID NO: 704 - protein, 406 aa, synthetic construct
MSGCPFLGNNFGYTFKKLPVEGSEEDKSQTGVNRASKGGLIYGNYLHLEKVLNAQELQSETKGNKIHDEHLFIITAQAYELWFKQILWELDSVREIFQNGHVRDERNMLKVVSRMHRVSVILKLLVQQFSILETMTALDFNDFREYLSPASGFQSLQFRLLENKIGVLQNMRVPYNRRHYRDNFKGEENELLLKSEQEKTLLELVEAWLERTPGLEPHGFNFWGKLEKNITRGLEEEFIRIQAKEESEEKEEQVAEFQKQKEVLLSLFDEKRHEHLLSKGERRLSYRALQGALMIYFYREEPRFQVPFQLLTSLMDIDSLMTKWRYNHVCMVHRMLGSKAGTGGSSGYHYLRSTVSDRYKVFVDLFNLSTYLIPRHWIPKMNPTIHKFLYTAEYCDSSYFSSDESD

SEQ ID NO: 705 - RNA, 1218 nt, synthetic construct
  source 1..1218: mol_type = other RNA
atgagcggctgccctttcctgggcaacaacttcggctacaccttcaagaagctgcctgtggagggcagcgaggaggacaagagccagaccggcgtgaacagagccagcaagggcggcctgatctacggcaactacctgcacctggagaaggtgctgaacgcccaggagctgcagagcgagacaaagggaaacaagatccacgacgagcacctgttcatcatcaccgcccaggcctacgagctgtggttcaagcagatcctgtgggagctggacagcgtgagagagatcttccagaacggccacgtacgggacgagagaaacatgctgaaggtggtgagcagaatgcacagagtgagcgtgatcctgaagctgctggtgcagcagttcagcatcctggaaacaatgaccgccctggacttcaacgacttcagagagtacctgagccctgccagcggcttccagagcctccagttcagactgctggagaacaagataggcgtgctgcagaacatgagagtgccttacaacagaagacactacagagacaacttcaagggcgaggagaacgagctgctgctcaagagcgagcaggagaagaccttgcttgaactggtggaggcctggctggagagaacccctggcctggagcctcacggcttcaacttctggggcaagttggagaagaacatcacccgcggtttagaagaagagttcatcagaatccaggccaaggaggaatccgaggagaaggaggagcaggtggccgagttccagaagcagaaggaggtgctcctaagcctgttcgacgagaagagacacgaacatctcttgtccaagggagagagaagactgagctatcgcgccctgcaaggagccctgatgatctacttctaccgtgaggagcctagattccaggtgcctttccagctgctgaccagcctgatggacatcgattcccttatgaccaagtggagatacaaccacgtgtgcatggtgcacagaatgctgggcagcaaggccggcaccggcggcagcagcggctaccactacctgagaagcaccgtgagcgacagatacaaggtgttcgtggacttgttcaacctgagcacctacctgatccctagacactggatccctaagatgaaccctaccatccacaagttcctgtacaccgccgagtactgcgacagcagctacttcagcagcgacgagagcgac

SEQ ID NO: 706 - protein, 436 aa, synthetic construct
MGSSKSKPKDPSQRRRGGGSAHAMENSWTISKEYHIDEEVGFALPNPQENLPDFYNDWMFIAKHLPDLIESGQLRERVEKLNMLSIDHLTDHKSQRLARLVLGCITMAYVWGKGHGDVRKVLPRNIAVPYCQLSKKLELPPILVYADCVLANWKKKDPNKPLTYENMDVLFSFRDGDCSKGFFLVSLLVEIAAASAIKVIPTVFKAMQMQERDTLLKALLEIASCLEKALQVFHQIHDHVNPKAAFSVLRIYLSGWKGNPQLSDGLVYEGFWEDPKEFAGGSAGQSSVFQCFDVLLGIQQTAGGGHAAQFLQDMRRYMPPAHRNFLCSLESNPSVREFVLSKGDAGLREAYDACVKALVSLRSYHLQIVTKYILIPASQQPKENKTSEDPSKLEAKGTGGTDLMNFLKTVRSTTEKSLLKEGGKPIPNPLLGLDST

SEQ ID NO: 707 - RNA, 1308 nt, synthetic construct
  source 1..1308: mol_type = other RNA
atggggtcgtcgaagtcgaagccgaaagatcctagtcagcgcaggaggggaggaggatccgcccacgccatggagaacagctggaccatcagcaaggagtaccacatcgacgaggaggtgggcttcgccctgcccaacccacaggagaacctgcccgacttctacaacgactggatgttcatcgccaagcacctgcccgacctgatcgagagcgggcagctgcgggaacgggtggagaagctgaacatgctgagcatcgaccacctgaccgaccacaagtcccagcggttggctcggctggtgctgggctgcatcaccatggcctacgtgtggggaaaggggcacggtgacgtgcggaaggtgctgccccgcaacatcgccgtgccctactgccagctgagcaagaagctggagctgcctccgatcctggtgtacgccgactgcgtgctggccaactggaagaagaaggaccccaacaagcccctgacctacgagaacatggacgtgctgttctccttccgggacggggactgcagcaaggggttcttcctggtgagcctgctggtggagatcgccgccgcctctgccatcaaggtgatccccaccgtgttcaaggccatgcagatgcaggagagggacaccctgctgaaggccctgctggagatcgccagctgcctggagaaggccctgcaggtgttccaccagatccacgaccacgtgaaccccaaggccgccttcagcgtgctgcgcatctacctgtccggctggaagggcaatccccagctgagcgacggcctggtgtacgagggcttctgggaggaccccaaggaatttgctggcggtagcgctggccagtccagcgtgttccagtgcttcgacgtgctgctgggcattcagcaaaccgctggaggcggacacgctgcccagttcctgcaggacatgcggcggtacatgccaccggcccaccgcaacttcctgtgctccctggagagcaacccctccgtgcgggagttcgtgctgtccaagggcgacgccggactgagggaggcctacgacgcctgcgtgaaggccctggtgtccctgcgcagctaccacctgcagatcgtgaccaagtacatcctgatccccgcaagccagcagcccaaggagaacaagaccagcgaggacccctccaagctggaagctaagggcaccggcggcactgacctgatgaacttcctgaagaccgtgcggagcaccaccgagaagagcctgctgaaggagggcgggaagccgatcccgaatcccctcctcgggctcgactcgacg

SEQ ID NO: 708 - RNA, 47 nt, synthetic construct
  source 1..47: mol_type = other RNA
gggaaataagagagaaaagaagagtaagaagaaatataagagccacc

SEQ ID NO: 709 - DNA, 121 bp, synthetic construct
  source 1..121: mol_type = other DNA
  modified_base 121: mod_base = OTHER; note = inverted deoxythymidine
  misc_feature 1..120: note = RNA
  misc_feature 121: note = DNA
aaaaaaaaaaaaaaaaaaaaaaaaaaaaaaaaaaaaaaaaaaaaaaaaaaaaaaaaaaaaaaaaaaaaaaaaaaaaaaaaaaaaaaaaaaaaaaaaaaaaaaaaaaaaaaaaaaaaaaaat

SEQ ID NO: 710 - RNA, 21 nt, synthetic construct
  source 1..21: mol_type = other RNA
cgcgtaccaaaagtaataatg

What is claimed is:

1. A lipid nanoparticle (LNP) composition comprising a polynucleotide comprising an mRNA which encodes a chimeric metabolic reprogramming molecule comprising (i) a metabolic reprogramming molecule or a fragment thereof (e.g., a functional fragment, e.g., a biologically active fragment) chosen from: an Indoleamine-pyrrole 2,3-dioxygenase (IDO) molecule; a tryptophan 2,3-dioxygenase (TDO) molecule, or a combination thereof and (ii) a membrane anchoring moiety.

2. A lipid nanoparticle (LNP) composition for immunomodulation, e.g., for including immune tolerance (e.g., suppressing T effector cells), the composition comprising a polynucleotide comprising an mRNA which encodes (i) a metabolic reprogramming molecule or a fragment thereof (e.g., a functional fragment, e.g., a biologically active fragment)chosen from: an Indoleamine-pyrrole 2,3-dioxygenase (IDO) molecule; a tryptophan 2,3-dioxygenase (TDO) molecule, or a combination thereof and (ii) a membrane anchoring moiety.

3. A lipid nanoparticle composition, for stimulating T regulatory cells, the composition comprising a polynucleotide comprising an mRNA which encodes (i) a metabolic reprogramming molecule or a fragment thereof (e.g., a functional fragment, e.g., a biologically active fragment) chosen from: an Indoleamine-pyrrole 2,3-dioxygenase (IDO) molecule; a tryptophan 2,3-dioxygenase (TDO) molecule, or a combination thereof and (ii) a membrane anchoring moiety.

4. An mRNA construct comprising a polynucleotide which encodes (i) a metabolic reprogramming molecule or a fragment thereof (e.g., a functional fragment, e.g., a biologically active fragment) chosen from: an Indoleamine-pyrrole 2,3-dioxygenase (IDO) molecule; a tryptophan 2,3-dioxygenase (TDO) molecule, or a combination thereof and (ii) a membrane anchoring moiety.

5. The LNP composition or mRNA construct of any one of the preceding claims, wherein the metabolic reprogramming molecule is an IDO molecule.

6. The LNP composition or mRNA construct of claim 5, wherein the IDO molecule comprises a naturally occurring IDO molecule, a fragment (e.g., a functional fragment, e.g., a biologically active fragment) of a naturally occurring IDO molecule, or a variant thereof.

7. The LNP composition or mRNA construct of claim 5 or 6, wherein the IDO molecule has an enzymatic activity, e.g., as described herein.

8. The LNP composition or mRNA construct of any one of claims 5-7, wherein the IDO molecule comprises IDO1 or IDO2.

9. The LNP composition or mRNA construct of any one of claims 5-8, wherein the IDO molecule comprises IDO1.

10. The LNP composition or mRNA construct of any one of claims 5-8, wherein the IDO molecule comprises an amino acid sequence having at least 85%, 90%, 95%, 96%, 97%, 98%, 99% or 100% identity to the sequence of any one of SEQ ID NOs: 1, 4, 6, 16, or 18; or amino acids 2-436 of SEQ ID NO: 1; amino acids 2-422 of SEQ ID NO: 4; or amino acids 2-403 of SEQ ID NO: 6; amino acids 2-434 of SEQ ID NO: 16; or amino acids 2-422 of SEQ ID NO: 18, or a functional fragment thereof, optionally wherein the IDO molecule is a chimeric molecule, e.g., comprising an IDO portion and a non-IDO portion, e.g., a membrane anchoring moiety.

11. The LNP composition or mRNA construct of any one of claims 5-9, wherein the polynucleotide encoding the IDO molecule comprises a nucleotide sequence having at least 60%, 65%, 70%, 75%, 80%, 85%, 90%, 95%, 96%, 97%, 98%, 99% or 100% identity to the sequence of any one of SEQ ID NOs: 2, 3, 24, 5, 7, 17, 19, or 300-318, or a functional fragment thereof, or at least 60%, 65%, 70%, 75%, 80%, 85%, 90%, 95%, 96%, 97%, 98%, 99% or 100% identity to nucleotides 4-1308 of SEQ ID NO: 2; nucleotides 4-1308 of SEQ ID NO: 3; nucleotides 4-1308 of SEQ ID NO: 24; nucleotides 4-1266 of SEQ ID NO: 5; nucleotides 4-1209 of SEQ ID NO: 7; nucleotides 4-1302 of SEQ ID NO: 17; or nucleotides 4-1266 of SEQ ID NO: 19, or a functional fragment thereof, optionally wherein the nucleotide sequence is a codon-optimized nucleotide sequence, optionally wherein the IDO molecule encoded by the polynucleotide is a chimeric molecule, e.g., the polynucleotide further comprises a nucleotide sequence encoding a non-IDO portion of the molecule, e.g., a membrane anchoring moiety.

12. The LNP composition or mRNA construct of any one of claims 5-8, wherein the IDO molecule comprises IDO2.

13. The LNP composition or mRNA construct of claim 12, wherein the IDO molecule comprises an amino acid sequence having at least 85%, 90%, 95%, 96%, 97%, 98%, 99% or 100% identity to the sequence of SEQ ID NO: 8, or a functional fragment thereof, optionally wherein the IDO molecule is a chimeric molecule, e.g., comprising an IDO portion and a non-IDO portion, e.g., a membrane anchoring moiety.

14. The LNP composition or mRNA construct of claim 12 or 13, wherein the polynucleotide encoding the IDO molecule comprises a nucleotide sequence having at least 60%, 65%, 70%, 75%, 80%, 85%, 90%, 95%, 96%, 97%, 98%, 99% or 100% identity to the sequence of SEQ ID NO: 9 or 332, or a functional fragment thereof, or at least 60%, 65%, 70%, 75%, 80%, 85%, 90%, 95%, 96%, 97%, 98%, 99% or 100% identity to nucleotides 4-1260 of SEQ ID NO: 9, or a functional fragment thereof, optionally wherein the nucleotide sequence is a codon-optimized nucleotide sequence, optionally wherein the IDO molecule encoded by the polynucleotide is a chimeric molecule, e.g., the polynucleotide further comprises a nucleotide sequence encoding a non-IDO portion of the molecule, e.g., a membrane anchoring moiety.

15. The LNP composition or mRNA construct of any one of claims 1-4, wherein the metabolic reprogramming molecule is a TDO molecule.

16. The LNP composition or mRNA construct of claim 15, wherein the TDO molecule comprises a naturally occurring TDO molecule, a fragment (e.g., a functional fragment, e.g., a biologically active fragment) of a naturally occurring TDO molecule, or a variant thereof.

17. The LNP composition or mRNA construct of claim 15 or 16, wherein the TDO molecule comprises an amino acid sequence having at least 85%, 90%, 95%, 96%, 97%, 98%, 99% or 100% identity to the sequence of SEQ ID NO: 10, 12, 20, or 22 or amino acids 2-406 of SEQ ID NO: 10, amino acids 2-440 of SEQ ID NO: 12; amino acids 2-438 of SEQ ID NO: 20; or amino acids 2-426 of SEQ ID NO: 22, or a functional fragment thereof, optionally wherein the TDO molecule is a chimeric molecule, e.g., comprising a TDO portion and a non-TDO portion, e.g., a membrane anchoring moiety.

18. The LNP composition or mRNA construct of any one of claims 15-17, wherein the polynucleotide encoding the TDO molecule comprises a nucleotide sequence having at least 60%, 65%, 70%, 75%, 80%, 85%, 90%, 95%, 96%, 97%, 98%, 99% or 100% identity to the sequence of any one of SEQ ID NOs: 11, 13-15, 21, 23, or 319-331, or a functional fragment thereof, or at least 60%, 65%, 70%, 75%, 80%, 85%, 90%, 95%, 96%, 97%, 98%, 99% or 100% identity to nucleotides 4-1218 of SEQ ID NO: 11; nucleotides 4-1320 of SEQ ID NO: 13; nucleotides 4-1320 of SEQ ID NO: 14; nucleotides 4-1320 of SEQ ID NO: 15; nucleotides 4-1314 of SEQ ID NO: 21; or nucleotides 4-1278 of SEQ ID NO: 23, or a functional fragment thereof, optionally wherein the nucleotide sequence is a codon-optimized nucleotide sequence, optionally wherein the TDO molecule encoded by the polynucleotide is a chimeric molecule, e.g., the polynucleotide further comprises a nucleotide sequence encoding a non-TDO portion of the molecule, e.g., a membrane anchoring moiety.

19. The LNP composition or mRNA construct of any one of the preceding claims, wherein the membrane anchoring moiety comprises a peptide or polypeptide derived from a prenylated protein, a fatty acylated protein, or a glycosylphosphatidylinositol (GPI)-anchored protein.

20. The LNP composition or mRNA construct of any one of the preceding claims, wherein the membrane anchoring moiety is a RAS anchoring moiety.

21. The LNP composition or mRNA construct of claim 20, wherein the RAS anchoring moiety is a KRAS anchoring moiety comprising the sequence of SEQ ID NO: 501, or an amino acid sequence differing by no more than 1, 2, or 3 amino acids therefrom, or a functional fragment thereof.

22. The LNP composition or mRNA construct of any one of claims 1-19, wherein the membrane anchoring moiety is a SRC-family tyrosine kinase anchoring moiety.

23. The LNP composition or mRNA construct of claim 22, wherein the SRC-family tyrosine kinase anchoring moiety is a SRC anchoring moiety, optionally wherein the SRC anchoring moiety comprises a SRC myristylation sequence.

24. The LNP composition or mRNA construct of claim 23, wherein the membrane anchoring moiety is a SRC anchoring moiety comprising the sequence of SEQ ID NO: 500, or an amino acid sequence differing by no more than 1, 2, or 3 amino acids therefrom, or a functional fragment thereof.

25. The LNP composition or mRNA construct of any one of claims 1-19, wherein the membrane anchoring moiety is a GPI-anchored protein anchoring moiety.

26. The LNP composition or mRNA construct of any one of the preceding claims, wherein the membrane anchoring moiety is fused to the N-terminus or the C-terminus of the metabolic reprogramming molecule directly or indirectly.

27. The LNP composition or mRNA construct of any one of claims 1-26, which increases the level, e.g., expression and/or activity, of Kynurenine (Kyn) in, e.g., a sample comprising plasma, serum or a population of cells.

28. The LNP composition or mRNA construct of any one of claims 1-26, which increases the level, e.g., expression and/or activity, of T regulatory cells (T regs), e.g., Foxp3+ T regulatory cells.

29. The LNP composition or mRNA construct of any one of claims 1-26, which results in:
(i) reduced engraftment of donor cells, e.g., donor immune cells, e.g., T cells, in a subject or host, e.g., a human, a non-human primate (NHP), rat or mouse;
(ii) reduction in the level, activity and/or secretion of IFNg from engrafted donor immune cells, e.g., T cells, in a subject or host, e.g., a human, a non-human primate (NIP), rat or mouse; and/or
(iii) an absence of, prevention of, or delay in the onset of, graft vs host disease (GvHD) in a subject or a host, e.g., a human, a non-human primate (NIP), rat or mouse.

30. The LNP composition or mRNA construct of any one of claims 1-26, which results in amelioration or reduction of joint swelling, e.g., severity of joint swelling, e.g., as described herein, in a subject, e.g., as measured by an assay described herein.

31. The LNP composition or mRNA construct of any one of the preceding claims, wherein the polynucleotide comprising an mRNA encoding the metabolic reprograming molecule, comprises at least one chemical modification.

32. The LNP composition or mRNA construct of claim 31, wherein the chemical modification is selected from the group consisting of pseudouridine, N1-methylpseudouridine, 2-thiouridine, 4′-thiouridine, 5-methylcytosine, 2-thio-1-methyl-1-deaza-pseudouridine, 2-thio-1-methyl-pseudouridine, 2-thio-5-aza-uridine, 2-thio-dihydropseudouridine, 2-thio-dihydrouridine, 2-thio-pseudouridine, 4-methoxy-2-thio-pseudouridine, 4-methoxy-pseudouridine, 4-thio-1-methyl-pseudouridine, 4-thio-pseudouridine, 5-aza-uridine, dihydropseudouridine, 5-methyluridine, 5-methyluridine, 5-methoxyuridine, and 2′-O-methyl uridine.

33. The LNP composition of any one of the preceding claims, wherein the LNP composition comprises: (i) an ionizable lipid, e.g., an amino lipid; (ii) a sterol or other structural lipid; (iii) a non-cationic helper lipid or phospholipid; and (iv) a PEG-lipid.

34. The LNP composition of claim 33, wherein the ionizable lipid comprises Compound 18.

35. The LNP composition of claim 33, wherein the ionizable lipid comprises Compound 25.

36. A pharmaceutical composition comprising the LNP composition or mRNA construct of any one of claims 1-35.

37. A method of modulating, e.g., suppressing, an immune response in a subject, comprising administering to the subject in need thereof an effective amount of an LNP composition comprising a polynucleotide comprising an mRNA which encodes (i) a metabolic reprogramming molecule and (ii) a membrane anchoring moiety.

38. A method of stimulating T regulatory cells in a subject, comprising administering to the subject an effective amount of an LNP composition comprising a polynucleotide comprising an mRNA which encodes (i) a metabolic reprogramming molecule and (ii) a membrane anchoring moiety.

39. A method of treating, or preventing a symptom of, a disease with aberrant T cell function, e.g., an autoimmune disease or an inflammatory disease, comprising administering to the subject in need thereof an effective amount of an LNP composition comprising a polynucleotide comprising an mRNA which encodes (i) a metabolic reprogramming molecule and (ii) a membrane anchoring moiety.

40. The method of claim 39, wherein the disease is chosen from: rheumatoid arthritis (RA); graft versus host disease (GVHD) (e.g., acute GVHD or chronic GVHD); diabetes, e.g., Type 1 diabetes; inflammatory bowel disease (IBD); lupus (e.g., systemic lupus erythematosus (SLE)), multiple sclerosis: autoimmune hepatitis (e.g., Type 1 or Type 2); primary biliary cholangitis (PBC); primary sclerosing cholangitis (PSC); organ transplant associated rejection; myasthenia gravis: Parkinson's Disease; Alzheimer's Disease; amyotrophic lateral sclerosis: psoriasis: polymyositis (also known as dermatomyositis) or atopic dermatitis.

41. The method of any one of claims 37-40, wherein the LNP composition comprises a reprogramming molecule chosen from an Indoleamine-pyrrole 2,3-dioxygenase (IDO) molecule; a tryptophan 2,3-dioxygenase (TDO) molecule, or a combination thereof.

42. The method of any one of claims 37-41, wherein the LNP composition comprises: (i) an ionizable lipid, e.g., an amino lipid; (ii) a sterol or other structural lipid; (iii) a non-cationic helper lipid or phospholipid; and (iv) a PEG-lipid.

43. The method of claim 42, wherein the ionizable lipid comprises Compound 18.

44. The method of claim 42, wherein the ionizable lipid comprises Compound 25.
